United States Patent Application Publication US 2014/0161894 A1 - sequence listing, part 2

SEQ ID NO: 16996 - DNA, 23 bp, Artificial Sequence
  Description of Artificial Sequence: Synthetic oligonucleotide
  X-linked inhibitor of apoptosis (XIAP) siRNA
tggacatgaattaaagtatatga

SEQ ID NO: 16997 - DNA, 23 bp, Artificial Sequence
  Description of Artificial Sequence: Synthetic oligonucleotide
  X-linked inhibitor of apoptosis (XIAP) siRNA
ggacatgaattaaagtatatgat

SEQ ID NO: 16998 - DNA, 23 bp, Artificial Sequence
  Description of Artificial Sequence: Synthetic oligonucleotide
  X-linked inhibitor of apoptosis (XIAP) siRNA
gacatgaattaaagtatatgatg

SEQ ID NO: 16999 - DNA, 23 bp, Artificial Sequence
  Description of Artificial Sequence: Synthetic oligonucleotide
  X-linked inhibitor of apoptosis (XIAP) siRNA
acatgaattaaagtatatgatgc

SEQ ID NO: 17000 - DNA, 23 bp, Artificial Sequence
  Description of Artificial Sequence: Synthetic oligonucleotide
  X-linked inhibitor of apoptosis (XIAP) siRNA
catgaattaaagtatatgatgcc

SEQ ID NO: 17001 - DNA, 23 bp, Artificial Sequence
  Description of Artificial Sequence: Synthetic oligonucleotide
  X-linked inhibitor of apoptosis (XIAP) siRNA
atgaattaaagtatatgatgcca

SEQ ID NO: 17002 - DNA, 23 bp, Artificial Sequence
  Description of Artificial Sequence: Synthetic oligonucleotide
  X-linked inhibitor of apoptosis (XIAP) siRNA
tgaattaaagtatatgatgccag

SEQ ID NO: 17003 - DNA, 23 bp, Artificial Sequence
  Description of Artificial Sequence: Synthetic oligonucleotide
  X-linked inhibitor of apoptosis (XIAP) siRNA
gaattaaagtatatgatgccagc

SEQ ID NO: 17004 - DNA, 23 bp, Artificial Sequence
  Description of Artificial Sequence: Synthetic oligonucleotide
  X-linked inhibitor of apoptosis (XIAP) siRNA
aattaaagtatatgatgccagcc

SEQ ID NO: 17005 - DNA, 23 bp, Artificial Sequence
  Description of Artificial Sequence: Synthetic oligonucleotide
  X-linked inhibitor of apoptosis (XIAP) siRNA
attaaagtatatgatgccagcct

SEQ ID NO: 17006 - DNA, 23 bp, Artificial Sequence
  Description of Artificial Sequence: Synthetic oligonucleotide
  X-linked inhibitor of apoptosis (XIAP) siRNA
ttaaagtatatgatgccagcctg

SEQ ID NO: 17007 - DNA, 23 bp, Artificial Sequence
  Description of Artificial Sequence: Synthetic oligonucleotide
  X-linked inhibitor of apoptosis (XIAP) siRNA
taaagtatatgatgccagcctgg

SEQ ID NO: 17008 - DNA, 23 bp, Artificial Sequence
  Description of Artificial Sequence: Synthetic oligonucleotide
  X-linked inhibitor of apoptosis (XIAP) siRNA
aaagtatatgatgccagcctgga

SEQ ID NO: 17009 - DNA, 23 bp, Artificial Sequence
  Description of Artificial Sequence: Synthetic oligonucleotide
  X-linked inhibitor of apoptosis (XIAP) siRNA
aagtatatgatgccagcctggac

SEQ ID NO: 17010 - DNA, 23 bp, Artificial Sequence
  Description of Artificial Sequence: Synthetic oligonucleotide
  X-linked inhibitor of apoptosis (XIAP) siRNA
agtatatgatgccagcctggaca

SEQ ID NO: 17011 - DNA, 23 bp, Artificial Sequence
  Description of Artificial Sequence: Synthetic oligonucleotide
  X-linked inhibitor of apoptosis (XIAP) siRNA
gtatatgatgccagcctggacaa

SEQ ID NO: 17012 - DNA, 23 bp, Artificial Sequence
  Description of Artificial Sequence: Synthetic oligonucleotide
  X-linked inhibitor of apoptosis (XIAP) siRNA
tatatgatgccagcctggacaaa

SEQ ID NO: 17013 - DNA, 23 bp, Artificial Sequence
  Description of Artificial Sequence: Synthetic oligonucleotide
  X-linked inhibitor of apoptosis (XIAP) siRNA
atatgatgccagcctggacaaaa

SEQ ID NO: 17014 - DNA, 23 bp, Artificial Sequence
  Description of Artificial Sequence: Synthetic oligonucleotide
  X-linked inhibitor of apoptosis (XIAP) siRNA
tatgatgccagcctggacaaaag

SEQ ID NO: 17015 - DNA, 23 bp, Artificial Sequence
  Description of Artificial Sequence: Synthetic oligonucleotide
  X-linked inhibitor of apoptosis (XIAP) siRNA
atgatgccagcctggacaaaagg

SEQ ID NO: 17016 - DNA, 23 bp, Artificial Sequence
  Description of Artificial Sequence: Synthetic oligonucleotide
  X-linked inhibitor of apoptosis (XIAP) siRNA
tgatgccagcctggacaaaaggc

SEQ ID NO: 17017 - DNA, 23 bp, Artificial Sequence
  Description of Artificial Sequence: Synthetic oligonucleotide
  X-linked inhibitor of apoptosis (XIAP) siRNA
gatgccagcctggacaaaaggca

SEQ ID NO: 17018 - DNA, 23 bp, Artificial Sequence
  Description of Artificial Sequence: Synthetic oligonucleotide
  X-linked inhibitor of apoptosis (XIAP) siRNA
atgccagcctggacaaaaggcaa

SEQ ID NO: 17019 - DNA, 23 bp, Artificial Sequence
  Description of Artificial Sequence: Synthetic oligonucleotide
  X-linked inhibitor of apoptosis (XIAP) siRNA
tgccagcctggacaaaaggcaaa

SEQ ID NO: 17020 - DNA, 23 bp, Artificial Sequence
  Description of Artificial Sequence: Synthetic oligonucleotide
  X-linked inhibitor of apoptosis (XIAP) siRNA
gccagcctggacaaaaggcaaaa

SEQ ID NO: 17021 - DNA, 23 bp, Artificial Sequence
  Description of Artificial Sequence: Synthetic oligonucleotide
  X-linked inhibitor of apoptosis (XIAP) siRNA
ccagcctggacaaaaggcaaaac

SEQ ID NO: 17022 - DNA, 23 bp, Artificial Sequence
  Description of Artificial Sequence: Synthetic oligonucleotide
  X-linked inhibitor of apoptosis (XIAP) siRNA
cagcctggacaaaaggcaaaacc

SEQ ID NO: 17023 - DNA, 23 bp, Artificial Sequence
  Description of Artificial Sequence: Synthetic oligonucleotide
  X-linked inhibitor of apoptosis (XIAP) siRNA
agcctggacaaaaggcaaaaccc

SEQ ID NO: 17024 - DNA, 23 bp, Artificial Sequence
  Description of Artificial Sequence: Synthetic oligonucleotide
  X-linked inhibitor of apoptosis (XIAP) siRNA
gcctggacaaaaggcaaaaccct

SEQ ID NO: 17025 - DNA, 23 bp, Artificial Sequence
  Description of Artificial Sequence: Synthetic oligonucleotide
  X-linked inhibitor of apoptosis (XIAP) siRNA
cctggacaaaaggcaaaaccctg

SEQ ID NO: 17026 - DNA, 23 bp, Artificial Sequence
  Description of Artificial Sequence: Synthetic oligonucleotide
  X-linked inhibitor of apoptosis (XIAP) siRNA
ctggacaaaaggcaaaaccctgt

SEQ ID NO: 17027 - DNA, 23 bp, Artificial Sequence
  Description of Artificial Sequence: Synthetic oligonucleotide
  X-linked inhibitor of apoptosis (XIAP) siRNA
tggacaaaaggcaaaaccctgtc

SEQ ID NO: 17028 - DNA, 23 bp, Artificial Sequence
  Description of Artificial Sequence: Synthetic oligonucleotide
  X-linked inhibitor of apoptosis (XIAP) siRNA
ggacaaaaggcaaaaccctgtct

SEQ ID NO: 17029 - DNA, 23 bp, Artificial Sequence
  Description of Artificial Sequence: Synthetic oligonucleotide
  X-linked inhibitor of apoptosis (XIAP) siRNA
gacaaaaggcaaaaccctgtctc

SEQ ID NO: 17030 - DNA, 23 bp, Artificial Sequence
  Description of Artificial Sequence: Synthetic oligonucleotide
  X-linked inhibitor of apoptosis (XIAP) siRNA
acaaaaggcaaaaccctgtctct

SEQ ID NO: 17031 - DNA, 23 bp, Artificial Sequence
  Description of Artificial Sequence: Synthetic oligonucleotide
  X-linked inhibitor of apoptosis (XIAP) siRNA
caaaaggcaaaaccctgtctcta

SEQ ID NO: 17032 - DNA, 23 bp, Artificial Sequence
  Description of Artificial Sequence: Synthetic oligonucleotide
  X-linked inhibitor of apoptosis (XIAP) siRNA
aaaaggcaaaaccctgtctctac

SEQ ID NO: 17033 - DNA, 23 bp, Artificial Sequence
  Description of Artificial Sequence: Synthetic oligonucleotide
  X-linked inhibitor of apoptosis (XIAP) siRNA
aaaggcaaaaccctgtctctaca

SEQ ID NO: 17034 - DNA, 23 bp, Artificial Sequence
  Description of Artificial Sequence: Synthetic oligonucleotide
  X-linked inhibitor of apoptosis (XIAP) siRNA
aaggcaaaaccctgtctctacaa

SEQ ID NO: 17035 - DNA, 23 bp, Artificial Sequence
  Description of Artificial Sequence: Synthetic oligonucleotide
  X-linked inhibitor of apoptosis (XIAP) siRNA
aggcaaaaccctgtctctacaaa

SEQ ID NO: 17036 - DNA, 23 bp, Artificial Sequence
  Description of Artificial Sequence: Synthetic oligonucleotide
  X-linked inhibitor of apoptosis (XIAP) siRNA
ggcaaaaccctgtctctacaaaa

SEQ ID NO: 17037 - DNA, 23 bp, Artificial Sequence
  Description of Artificial Sequence: Synthetic oligonucleotide
  X-linked inhibitor of apoptosis (XIAP) siRNA
gcaaaaccctgtctctacaaaaa

SEQ ID NO: 17038 - DNA, 23 bp, Artificial Sequence
  Description of Artificial Sequence: Synthetic oligonucleotide
  X-linked inhibitor of apoptosis (XIAP) siRNA
caaaaccctgtctctacaaaaaa

SEQ ID NO: 17039 - DNA, 23 bp, Artificial Sequence
  Description of Artificial Sequence: Synthetic oligonucleotide
  X-linked inhibitor of apoptosis (XIAP) siRNA
aaaaccctgtctctacaaaaaat

SEQ ID NO: 17040 - DNA, 23 bp, Artificial Sequence
  Description of Artificial Sequence: Synthetic oligonucleotide
  X-linked inhibitor of apoptosis (XIAP) siRNA
aaaccctgtctctacaaaaaata

SEQ ID NO: 17041 - DNA, 23 bp, Artificial Sequence
  Description of Artificial Sequence: Synthetic oligonucleotide
  X-linked inhibitor of apoptosis (XIAP) siRNA
aaccctgtctctacaaaaaatac

SEQ ID NO: 17042 - DNA, 23 bp, Artificial Sequence
  Description of Artificial Sequence: Synthetic oligonucleotide
  X-linked inhibitor of apoptosis (XIAP) siRNA
accctgtctctacaaaaaataca

SEQ ID NO: 17043 - DNA, 23 bp, Artificial Sequence
  Description of Artificial Sequence: Synthetic oligonucleotide
  X-linked inhibitor of apoptosis (XIAP) siRNA
ccctgtctctacaaaaaatacaa

SEQ ID NO: 17044 - DNA, 23 bp, Artificial Sequence
  Description of Artificial Sequence: Synthetic oligonucleotide
  X-linked inhibitor of apoptosis (XIAP) siRNA
cctgtctctacaaaaaatacaaa

SEQ ID NO: 17045 - DNA, 23 bp, Artificial Sequence
  Description of Artificial Sequence: Synthetic oligonucleotide
  X-linked inhibitor of apoptosis (XIAP) siRNA
ctgtctctacaaaaaatacaaaa

SEQ ID NO: 17046 - DNA, 23 bp, Artificial Sequence
  Description of Artificial Sequence: Synthetic oligonucleotide
  X-linked inhibitor of apoptosis (XIAP) siRNA
tgtctctacaaaaaatacaaaaa

SEQ ID NO: 17047 - DNA, 23 bp, Artificial Sequence
  Description of Artificial Sequence: Synthetic oligonucleotide
  X-linked inhibitor of apoptosis (XIAP) siRNA
gtctctacaaaaaatacaaaaat

SEQ ID NO: 17048 - DNA, 23 bp, Artificial Sequence
  Description of Artificial Sequence: Synthetic oligonucleotide
  X-linked inhibitor of apoptosis (XIAP) siRNA
tctctacaaaaaatacaaaaatt

SEQ ID NO: 17049 - DNA, 23 bp, Artificial Sequence
  Description of Artificial Sequence: Synthetic oligonucleotide
  X-linked inhibitor of apoptosis (XIAP) siRNA
ctctacaaaaaatacaaaaatta

SEQ ID NO: 17050 - DNA, 23 bp, Artificial Sequence
  Description of Artificial Sequence: Synthetic oligonucleotide
  X-linked inhibitor of apoptosis (XIAP) siRNA
tctacaaaaaatacaaaaattag

SEQ ID NO: 17051 - DNA, 23 bp, Artificial Sequence
  Description of Artificial Sequence: Synthetic oligonucleotide
  X-linked inhibitor of apoptosis (XIAP) siRNA
ctacaaaaaatacaaaaattagc

SEQ ID NO: 17052 - DNA, 23 bp, Artificial Sequence
  Description of Artificial Sequence: Synthetic oligonucleotide
  X-linked inhibitor of apoptosis (XIAP) siRNA
tacaaaaaatacaaaaattagct

SEQ ID NO: 17053 - DNA, 23 bp, Artificial Sequence
  Description of Artificial Sequence: Synthetic oligonucleotide
  X-linked inhibitor of apoptosis (XIAP) siRNA
acaaaaaatacaaaaattagctg

SEQ ID NO: 17054 - DNA, 23 bp, Artificial Sequence
  Description of Artificial Sequence: Synthetic oligonucleotide
  X-linked inhibitor of apoptosis (XIAP) siRNA
caaaaaatacaaaaattagctgg

SEQ ID NO: 17055 - DNA, 23 bp, Artificial Sequence
  Description of Artificial Sequence: Synthetic oligonucleotide
  X-linked inhibitor of apoptosis (XIAP) siRNA
aaaaaatacaaaaattagctggg

SEQ ID NO: 17056 - DNA, 23 bp, Artificial Sequence
  Description of Artificial Sequence: Synthetic oligonucleotide
  X-linked inhibitor of apoptosis (XIAP) siRNA
aaaaatacaaaaattagctgggc

SEQ ID NO: 17057 - DNA, 23 bp, Artificial Sequence
  Description of Artificial Sequence: Synthetic oligonucleotide
  X-linked inhibitor of apoptosis (XIAP) siRNA
aaaatacaaaaattagctgggca

SEQ ID NO: 17058 - DNA, 23 bp, Artificial Sequence
  Description of Artificial Sequence: Synthetic oligonucleotide
  X-linked inhibitor of apoptosis (XIAP) siRNA
aaatacaaaaattagctgggcat

SEQ ID NO: 17059 - DNA, 23 bp, Artificial Sequence
  Description of Artificial Sequence: Synthetic oligonucleotide
  X-linked inhibitor of apoptosis (XIAP) siRNA
aatacaaaaattagctgggcatg

SEQ ID NO: 17060 - DNA, 23 bp, Artificial Sequence
  Description of Artificial Sequence: Synthetic oligonucleotide
  X-linked inhibitor of apoptosis (XIAP) siRNA
atacaaaaattagctgggcatgg

SEQ ID NO: 17061 - DNA, 23 bp, Artificial Sequence
  Description of Artificial Sequence: Synthetic oligonucleotide
  X-linked inhibitor of apoptosis (XIAP) siRNA
tacaaaaattagctgggcatggt

SEQ ID NO: 17062 - DNA, 23 bp, Artificial Sequence
  Description of Artificial Sequence: Synthetic oligonucleotide
  X-linked inhibitor of apoptosis (XIAP) siRNA
acaaaaattagctgggcatggtg

SEQ ID NO: 17063 - DNA, 23 bp, Artificial Sequence
  Description of Artificial Sequence: Synthetic oligonucleotide
  X-linked inhibitor of apoptosis (XIAP) siRNA
caaaaattagctgggcatggtgg

SEQ ID NO: 17064 - DNA, 23 bp, Artificial Sequence
  Description of Artificial Sequence: Synthetic oligonucleotide
  X-linked inhibitor of apoptosis (XIAP) siRNA
aaaaattagctgggcatggtggt

SEQ ID NO: 17065 - DNA, 23 bp, Artificial Sequence
  Description of Artificial Sequence: Synthetic oligonucleotide
  X-linked inhibitor of apoptosis (XIAP) siRNA
aaaattagctgggcatggtggtg

SEQ ID NO: 17066 - DNA, 23 bp, Artificial Sequence
  Description of Artificial Sequence: Synthetic oligonucleotide
  X-linked inhibitor of apoptosis (XIAP) siRNA
aaattagctgggcatggtggtgt

SEQ ID NO: 17067 - DNA, 23 bp, Artificial Sequence
  Description of Artificial Sequence: Synthetic oligonucleotide
  X-linked inhibitor of apoptosis (XIAP) siRNA
aattagctgggcatggtggtgtg

SEQ ID NO: 17068 - DNA, 23 bp, Artificial Sequence
  Description of Artificial Sequence: Synthetic oligonucleotide
  X-linked inhibitor of apoptosis (XIAP) siRNA
attagctgggcatggtggtgtgt

SEQ ID NO: 17069 - DNA, 23 bp, Artificial Sequence
  Description of Artificial Sequence: Synthetic oligonucleotide
  X-linked inhibitor of apoptosis (XIAP) siRNA
ttagctgggcatggtggtgtgtg

SEQ ID NO: 17070 - DNA, 23 bp, Artificial Sequence
  Description of Artificial Sequence: Synthetic oligonucleotide
  X-linked inhibitor of apoptosis (XIAP) siRNA
tagctgggcatggtggtgtgtgc

SEQ ID NO: 17071 - DNA, 23 bp, Artificial Sequence
  Description of Artificial Sequence: Synthetic oligonucleotide
  X-linked inhibitor of apoptosis (XIAP) siRNA
agctgggcatggtggtgtgtgcc

SEQ ID NO: 17072 - DNA, 23 bp, Artificial Sequence
  Description of Artificial Sequence: Synthetic oligonucleotide
  X-linked inhibitor of apoptosis (XIAP) siRNA
gctgggcatggtggtgtgtgcct

SEQ ID NO: 17073 - DNA, 23 bp, Artificial Sequence
  Description of Artificial Sequence: Synthetic oligonucleotide
  X-linked inhibitor of apoptosis (XIAP) siRNA
ctgggcatggtggtgtgtgcctg

SEQ ID NO: 17074 - DNA, 23 bp, Artificial Sequence
  Description of Artificial Sequence: Synthetic oligonucleotide
  X-linked inhibitor of apoptosis (XIAP) siRNA
tgggcatggtggtgtgtgcctgt

SEQ ID NO: 17075 - DNA, 23 bp, Artificial Sequence
  Description of Artificial Sequence: Synthetic oligonucleotide
  X-linked inhibitor of apoptosis (XIAP) siRNA
gggcatggtggtgtgtgcctgta

SEQ ID NO: 17076 - DNA, 23 bp, Artificial Sequence
  Description of Artificial Sequence: Synthetic oligonucleotide
  X-linked inhibitor of apoptosis (XIAP) siRNA
ggcatggtggtgtgtgcctgtag

SEQ ID NO: 17077 - DNA, 23 bp, Artificial Sequence
  Description of Artificial Sequence: Synthetic oligonucleotide
  X-linked inhibitor of apoptosis (XIAP) siRNA
gcatggtggtgtgtgcctgtagt

SEQ ID NO: 17078 - DNA, 23 bp, Artificial Sequence
  Description of Artificial Sequence: Synthetic oligonucleotide
  X-linked inhibitor of apoptosis (XIAP) siRNA
catggtggtgtgtgcctgtagtc

SEQ ID NO: 17079 - DNA, 23 bp, Artificial Sequence
  Description of Artificial Sequence: Synthetic oligonucleotide
  X-linked inhibitor of apoptosis (XIAP) siRNA
atggtggtgtgtgcctgtagtcc

SEQ ID NO: 17080 - DNA, 23 bp, Artificial Sequence
  Description of Artificial Sequence: Synthetic oligonucleotide
  X-linked inhibitor of apoptosis (XIAP) siRNA
tggtggtgtgtgcctgtagtcct

SEQ ID NO: 17081 - DNA, 23 bp, Artificial Sequence
  Description of Artificial Sequence: Synthetic oligonucleotide
  X-linked inhibitor of apoptosis (XIAP) siRNA
ggtggtgtgtgcctgtagtcctg

SEQ ID NO: 17082 - DNA, 23 bp, Artificial Sequence
  Description of Artificial Sequence: Synthetic oligonucleotide
  X-linked inhibitor of apoptosis (XIAP) siRNA
gtggtgtgtgcctgtagtcctgg

SEQ ID NO: 17083 - DNA, 23 bp, Artificial Sequence
  Description of Artificial Sequence: Synthetic oligonucleotide
  X-linked inhibitor of apoptosis (XIAP) siRNA
tggtgtgtgcctgtagtcctggc

SEQ ID NO: 17084 - DNA, 23 bp, Artificial Sequence
  Description of Artificial Sequence: Synthetic oligonucleotide
  X-linked inhibitor of apoptosis (XIAP) siRNA
ggtgtgtgcctgtagtcctggct

SEQ ID NO: 17085 - DNA, 23 bp, Artificial Sequence
  Description of Artificial Sequence: Synthetic oligonucleotide
  X-linked inhibitor of apoptosis (XIAP) siRNA
gtgtgtgcctgtagtcctggcta

SEQ ID NO: 17086 - DNA, 23 bp, Artificial Sequence
  Description of Artificial Sequence: Synthetic oligonucleotide
  X-linked inhibitor of apoptosis (XIAP) siRNA
tgtgtgcctgtagtcctggctac

SEQ ID NO: 17087 - DNA, 23 bp, Artificial Sequence
  Description of Artificial Sequence: Synthetic oligonucleotide
  X-linked inhibitor of apoptosis (XIAP) siRNA
gtgtgcctgtagtcctggctact

SEQ ID NO: 17088 - DNA, 23 bp, Artificial Sequence
  Description of Artificial Sequence: Synthetic oligonucleotide
  X-linked inhibitor of apoptosis (XIAP) siRNA
tgtgcctgtagtcctggctactc

SEQ ID NO: 17089 - DNA, 23 bp, Artificial Sequence
  Description of Artificial Sequence: Synthetic oligonucleotide
  X-linked inhibitor of apoptosis (XIAP) siRNA
gtgcctgtagtcctggctactcc

SEQ ID NO: 17090 - DNA, 23 bp, Artificial Sequence
  Description of Artificial Sequence: Synthetic oligonucleotide
  X-linked inhibitor of apoptosis (XIAP) siRNA
tgcctgtagtcctggctactccg

SEQ ID NO: 17091 - DNA, 23 bp, Artificial Sequence
  Description of Artificial Sequence: Synthetic oligonucleotide
  X-linked inhibitor of apoptosis (XIAP) siRNA
gcctgtagtcctggctactccgg

SEQ ID NO: 17092 - DNA, 23 bp, Artificial Sequence
  Description of Artificial Sequence: Synthetic oligonucleotide
  X-linked inhibitor of apoptosis (XIAP) siRNA
cctgtagtcctggctactccgga

SEQ ID NO: 17093 - DNA, 23 bp, Artificial Sequence
  Description of Artificial Sequence: Synthetic oligonucleotide
  X-linked inhibitor of apoptosis (XIAP) siRNA
ctgtagtcctggctactccggag

SEQ ID NO: 17094 - DNA, 23 bp, Artificial Sequence
  Description of Artificial Sequence: Synthetic oligonucleotide
  X-linked inhibitor of apoptosis (XIAP) siRNA
tgtagtcctggctactccggagc

SEQ ID NO: 17095 - DNA, 23 bp, Artificial Sequence
  Description of Artificial Sequence: Synthetic oligonucleotide
  X-linked inhibitor of apoptosis (XIAP) siRNA
gtagtcctggctactccggagcc

SEQ ID NO: 17096 - DNA, 23 bp, Artificial Sequence
  Description of Artificial Sequence: Synthetic oligonucleotide
  X-linked inhibitor of apoptosis (XIAP) siRNA
tagtcctggctactccggagcct

SEQ ID NO: 17097 - DNA, 23 bp, Artificial Sequence
  Description of Artificial Sequence: Synthetic oligonucleotide
  X-linked inhibitor of apoptosis (XIAP) siRNA
agtcctggctactccggagcctg

SEQ ID NO: 17098 - DNA, 23 bp, Artificial Sequence
  Description of Artificial Sequence: Synthetic oligonucleotide
  X-linked inhibitor of apoptosis (XIAP) siRNA
gtcctggctactccggagcctga

SEQ ID NO: 17099 - DNA, 23 bp, Artificial Sequence
  Description of Artificial Sequence: Synthetic oligonucleotide
  X-linked inhibitor of apoptosis (XIAP) siRNA
tcctggctactccggagcctgag

SEQ ID NO: 17100 - DNA, 23 bp, Artificial Sequence
  Description of Artificial Sequence: Synthetic oligonucleotide
  X-linked inhibitor of apoptosis (XIAP) siRNA
cctggctactccggagcctgagg

SEQ ID NO: 17101 - DNA, 23 bp, Artificial Sequence
  Description of Artificial Sequence: Synthetic oligonucleotide
  X-linked inhibitor of apoptosis (XIAP) siRNA
ctggctactccggagcctgaggt

SEQ ID NO: 17102 - DNA, 23 bp, Artificial Sequence
  Description of Artificial Sequence: Synthetic oligonucleotide
  X-linked inhibitor of apoptosis (XIAP) siRNA
tggctactccggagcctgaggtg

SEQ ID NO: 17103 - DNA, 23 bp, Artificial Sequence
  Description of Artificial Sequence: Synthetic oligonucleotide
  X-linked inhibitor of apoptosis (XIAP) siRNA
ggctactccggagcctgaggtgg

SEQ ID NO: 17104 - DNA, 23 bp, Artificial Sequence
  Description of Artificial Sequence: Synthetic oligonucleotide
  X-linked inhibitor of apoptosis (XIAP) siRNA
gctactccggagcctgaggtggg

SEQ ID NO: 17105 - DNA, 23 bp, Artificial Sequence
  Description of Artificial Sequence: Synthetic oligonucleotide
  X-linked inhibitor of apoptosis (XIAP) siRNA
ctactccggagcctgaggtggga

SEQ ID NO: 17106 - DNA, 23 bp, Artificial Sequence
  Description of Artificial Sequence: Synthetic oligonucleotide
  X-linked inhibitor of apoptosis (XIAP) siRNA
tactccggagcctgaggtgggag

SEQ ID NO: 17107 - DNA, 23 bp, Artificial Sequence
  Description of Artificial Sequence: Synthetic oligonucleotide
  X-linked inhibitor of apoptosis (XIAP) siRNA
actccggagcctgaggtgggagg

SEQ ID NO: 17108 - DNA, 23 bp, Artificial Sequence
  Description of Artificial Sequence: Synthetic oligonucleotide
  X-linked inhibitor of apoptosis (XIAP) siRNA
ctccggagcctgaggtgggagga

SEQ ID NO: 17109 - DNA, 23 bp, Artificial Sequence
  Description of Artificial Sequence: Synthetic oligonucleotide
  X-linked inhibitor of apoptosis (XIAP) siRNA
tccggagcctgaggtgggaggat

SEQ ID NO: 17110 - DNA, 23 bp, Artificial Sequence
  Description of Artificial Sequence: Synthetic oligonucleotide
  X-linked inhibitor of apoptosis (XIAP) siRNA
ccggagcctgaggtgggaggatc

SEQ ID NO: 17111 - DNA, 23 bp, Artificial Sequence
  Description of Artificial Sequence: Synthetic oligonucleotide
  X-linked inhibitor of apoptosis (XIAP) siRNA
cggagcctgaggtgggaggatcg

SEQ ID NO: 17112 - DNA, 23 bp, Artificial Sequence
  Description of Artificial Sequence: Synthetic oligonucleotide
  X-linked inhibitor of apoptosis (XIAP) siRNA
ggagcctgaggtgggaggatcgc

SEQ ID NO: 17113 - DNA, 23 bp, Artificial Sequence
  Description of Artificial Sequence: Synthetic oligonucleotide
  X-linked inhibitor of apoptosis (XIAP) siRNA
gagcctgaggtgggaggatcgct

SEQ ID NO: 17114 - DNA, 23 bp, Artificial Sequence
  Description of Artificial Sequence: Synthetic oligonucleotide
  X-linked inhibitor of apoptosis (XIAP) siRNA
agcctgaggtgggaggatcgctt

SEQ ID NO: 17115 - DNA, 23 bp, Artificial Sequence
  Description of Artificial Sequence: Synthetic oligonucleotide
  X-linked inhibitor of apoptosis (XIAP) siRNA
gcctgaggtgggaggatcgcttg

SEQ ID NO: 17116 - DNA, 23 bp, Artificial Sequence
  Description of Artificial Sequence: Synthetic oligonucleotide
  X-linked inhibitor of apoptosis (XIAP) siRNA
cctgaggtgggaggatcgcttga

SEQ ID NO: 17117 - DNA, 23 bp, Artificial Sequence
  Description of Artificial Sequence: Synthetic oligonucleotide
  X-linked inhibitor of apoptosis (XIAP) siRNA
ctgaggtgggaggatcgcttgag

SEQ ID NO: 17118 - DNA, 23 bp, Artificial Sequence
  Description of Artificial Sequence: Synthetic oligonucleotide
  X-linked inhibitor of apoptosis (XIAP) siRNA
tgaggtgggaggatcgcttgagt

SEQ ID NO: 17119 - DNA, 23 bp, Artificial Sequence
  Description of Artificial Sequence: Synthetic oligonucleotide
  X-linked inhibitor of apoptosis (XIAP) siRNA
gaggtgggaggatcgcttgagtc

SEQ ID NO: 17120 - DNA, 23 bp, Artificial Sequence
  Description of Artificial Sequence: Synthetic oligonucleotide
  X-linked inhibitor of apoptosis (XIAP) siRNA
aggtgggaggatcgcttgagtct

SEQ ID NO: 17121 - DNA, 23 bp, Artificial Sequence
  Description of Artificial Sequence: Synthetic oligonucleotide
  X-linked inhibitor of apoptosis (XIAP) siRNA
ggtgggaggatcgcttgagtctg

SEQ ID NO: 17122 - DNA, 23 bp, Artificial Sequence
  Description of Artificial Sequence: Synthetic oligonucleotide
  X-linked inhibitor of apoptosis (XIAP) siRNA
gtgggaggatcgcttgagtctgg

SEQ ID NO: 17123 - DNA, 23 bp, Artificial Sequence
  Description of Artificial Sequence: Synthetic oligonucleotide
  X-linked inhibitor of apoptosis (XIAP) siRNA
tgggaggatcgcttgagtctggg

SEQ ID NO: 17124 - DNA, 23 bp, Artificial Sequence
  Description of Artificial Sequence: Synthetic oligonucleotide
  X-linked inhibitor of apoptosis (XIAP) siRNA
gggaggatcgcttgagtctggga

SEQ ID NO: 17125 - DNA, 23 bp, Artificial Sequence
  Description of Artificial Sequence: Synthetic oligonucleotide
  X-linked inhibitor of apoptosis (XIAP) siRNA
ggaggatcgcttgagtctgggag

SEQ ID NO: 17126 - DNA, 23 bp, Artificial Sequence
  Description of Artificial Sequence: Synthetic oligonucleotide
  X-linked inhibitor of apoptosis (XIAP) siRNA
gaggatcgcttgagtctgggagg

SEQ ID NO: 17127 - DNA, 23 bp, Artificial Sequence
  Description of Artificial Sequence: Synthetic oligonucleotide
  X-linked inhibitor of apoptosis (XIAP) siRNA
aggatcgcttgagtctgggaggc

SEQ ID NO: 17128 - DNA, 23 bp, Artificial Sequence
  Description of Artificial Sequence: Synthetic oligonucleotide
  X-linked inhibitor of apoptosis (XIAP) siRNA
ggatcgcttgagtctgggaggca

SEQ ID NO: 17129 - DNA, 23 bp, Artificial Sequence
  Description of Artificial Sequence: Synthetic oligonucleotide
  X-linked inhibitor of apoptosis (XIAP) siRNA
gatcgcttgagtctgggaggcag

SEQ ID NO: 17130 - DNA, 23 bp, Artificial Sequence
  Description of Artificial Sequence: Synthetic oligonucleotide
  X-linked inhibitor of apoptosis (XIAP) siRNA
atcgcttgagtctgggaggcaga

SEQ ID NO: 17131 - DNA, 23 bp, Artificial Sequence
  Description of Artificial Sequence: Synthetic oligonucleotide
  X-linked inhibitor of apoptosis (XIAP) siRNA
tcgcttgagtctgggaggcagag

SEQ ID NO: 17132 - DNA, 23 bp, Artificial Sequence
  Description of Artificial Sequence: Synthetic oligonucleotide
  X-linked inhibitor of apoptosis (XIAP) siRNA
cgcttgagtctgggaggcagagg

SEQ ID NO: 17133 - DNA, 23 bp, Artificial Sequence
  Description of Artificial Sequence: Synthetic oligonucleotide
  X-linked inhibitor of apoptosis (XIAP) siRNA
gcttgagtctgggaggcagaggc

SEQ ID NO: 17134 - DNA, 23 bp, Artificial Sequence
  Description of Artificial Sequence: Synthetic oligonucleotide
  X-linked inhibitor of apoptosis (XIAP) siRNA
cttgagtctgggaggcagaggct

SEQ ID NO: 17135 - DNA, 23 bp, Artificial Sequence
  Description of Artificial Sequence: Synthetic oligonucleotide
  X-linked inhibitor of apoptosis (XIAP) siRNA
ttgagtctgggaggcagaggctg

SEQ ID NO: 17136 - DNA, 23 bp, Artificial Sequence
  Description of Artificial Sequence: Synthetic oligonucleotide
  X-linked inhibitor of apoptosis (XIAP) siRNA
tgagtctgggaggcagaggctgc

SEQ ID NO: 17137 - DNA, 23 bp, Artificial Sequence
  Description of Artificial Sequence: Synthetic oligonucleotide
  X-linked inhibitor of apoptosis (XIAP) siRNA
gagtctgggaggcagaggctgca

SEQ ID NO: 17138 - DNA, 23 bp, Artificial Sequence
  Description of Artificial Sequence: Synthetic oligonucleotide
  X-linked inhibitor of apoptosis (XIAP) siRNA
agtctgggaggcagaggctgcat

SEQ ID NO: 17139 - DNA, 23 bp, Artificial Sequence
  Description of Artificial Sequence: Synthetic oligonucleotide
  X-linked inhibitor of apoptosis (XIAP) siRNA
gtctgggaggcagaggctgcatt

SEQ ID NO: 17140 - DNA, 23 bp, Artificial Sequence
  Description of Artificial Sequence: Synthetic oligonucleotide
  X-linked inhibitor of apoptosis (XIAP) siRNA
tctgggaggcagaggctgcattg

SEQ ID NO: 17141 - DNA, 23 bp, Artificial Sequence
  Description of Artificial Sequence: Synthetic oligonucleotide
  X-linked inhibitor of apoptosis (XIAP) siRNA
ctgggaggcagaggctgcattga

SEQ ID NO: 17142 - DNA, 23 bp, Artificial Sequence
  Description of Artificial Sequence: Synthetic oligonucleotide
  X-linked inhibitor of apoptosis (XIAP) siRNA
tgggaggcagaggctgcattgag

SEQ ID NO: 17143 - DNA, 23 bp, Artificial Sequence
  Description of Artificial Sequence: Synthetic oligonucleotide
  X-linked inhibitor of apoptosis (XIAP) siRNA
gggaggcagaggctgcattgagc

SEQ ID NO: 17144 - DNA, 23 bp, Artificial Sequence
  Description of Artificial Sequence: Synthetic oligonucleotide
  X-linked inhibitor of apoptosis (XIAP) siRNA
ggaggcagaggctgcattgagct

SEQ ID NO: 17145 - DNA, 23 bp, Artificial Sequence
  Description of Artificial Sequence: Synthetic oligonucleotide
  X-linked inhibitor of apoptosis (XIAP) siRNA
gaggcagaggctgcattgagcta

SEQ ID NO: 17146 - DNA, 23 bp, Artificial Sequence
  Description of Artificial Sequence: Synthetic oligonucleotide
  X-linked inhibitor of apoptosis (XIAP) siRNA
aggcagaggctgcattgagctat

SEQ ID NO: 17147 - DNA, 23 bp, Artificial Sequence
  Description of Artificial Sequence: Synthetic oligonucleotide
  X-linked inhibitor of apoptosis (XIAP) siRNA
ggcagaggctgcattgagctatg

SEQ ID NO: 17148 - DNA, 23 bp, Artificial Sequence
  Description of Artificial Sequence: Synthetic oligonucleotide
  X-linked inhibitor of apoptosis (XIAP) siRNA
gcagaggctgcattgagctatga

SEQ ID NO: 17149 - DNA, 23 bp, Artificial Sequence
  Description of Artificial Sequence: Synthetic oligonucleotide
  X-linked inhibitor of apoptosis (XIAP) siRNA
cagaggctgcattgagctatgat

SEQ ID NO: 17150 - DNA, 23 bp, Artificial Sequence
  Description of Artificial Sequence: Synthetic oligonucleotide
  X-linked inhibitor of apoptosis (XIAP) siRNA
agaggctgcattgagctatgatc

SEQ ID NO: 17151 - DNA, 23 bp, Artificial Sequence
  Description of Artificial Sequence: Synthetic oligonucleotide
  X-linked inhibitor of apoptosis (XIAP) siRNA
gaggctgcattgagctatgatca

SEQ ID NO: 17152 - DNA, 23 bp, Artificial Sequence
  Description of Artificial Sequence: Synthetic oligonucleotide
  X-linked inhibitor of apoptosis (XIAP) siRNA
aggctgcattgagctatgatcat

SEQ ID NO: 17153 - DNA, 23 bp, Artificial Sequence
  Description of Artificial Sequence: Synthetic oligonucleotide
  X-linked inhibitor of apoptosis (XIAP) siRNA
ggctgcattgagctatgatcatg

SEQ ID NO: 17154 - DNA, 23 bp, Artificial Sequence
  Description of Artificial Sequence: Synthetic oligonucleotide
  X-linked inhibitor of apoptosis (XIAP) siRNA
gctgcattgagctatgatcatgg

SEQ ID NO: 17155 - DNA, 23 bp, Artificial Sequence
  Description of Artificial Sequence: Synthetic oligonucleotide
  X-linked inhibitor of apoptosis (XIAP) siRNA
ctgcattgagctatgatcatggc

SEQ ID NO: 17156 - DNA, 23 bp, Artificial Sequence
  Description of Artificial Sequence: Synthetic oligonucleotide
  X-linked inhibitor of apoptosis (XIAP) siRNA
tgcattgagctatgatcatggca

SEQ ID NO: 17157 - DNA, 23 bp, Artificial Sequence
  Description of Artificial Sequence: Synthetic oligonucleotide
  X-linked inhibitor of apoptosis (XIAP) siRNA
gcattgagctatgatcatggcac

SEQ ID NO: 17158 - DNA, 23 bp, Artificial Sequence
  Description of Artificial Sequence: Synthetic oligonucleotide
  X-linked inhibitor of apoptosis (XIAP) siRNA
cattgagctatgatcatggcact

SEQ ID NO: 17159 - DNA, 23 bp, Artificial Sequence
  Description of Artificial Sequence: Synthetic oligonucleotide
  X-linked inhibitor of apoptosis (XIAP) siRNA
attgagctatgatcatggcactg

SEQ ID NO: 17160 - DNA, 23 bp, Artificial Sequence
  Description of Artificial Sequence: Synthetic oligonucleotide
  X-linked inhibitor of apoptosis (XIAP) siRNA
ttgagctatgatcatggcactgc

SEQ ID NO: 17161 - DNA, 23 bp, Artificial Sequence
  Description of Artificial Sequence: Synthetic oligonucleotide
  X-linked inhibitor of apoptosis (XIAP) siRNA
tgagctatgatcatggcactgca

SEQ ID NO: 17162 - DNA, 23 bp, Artificial Sequence
  Description of Artificial Sequence: Synthetic oligonucleotide
  X-linked inhibitor of apoptosis (XIAP) siRNA
gagctatgatcatggcactgcat

SEQ ID NO: 17163 - DNA, 23 bp, Artificial Sequence
  Description of Artificial Sequence: Synthetic oligonucleotide
  X-linked inhibitor of apoptosis (XIAP) siRNA
agctatgatcatggcactgcatt

SEQ ID NO: 17164 - DNA, 23 bp, Artificial Sequence
  Description of Artificial Sequence: Synthetic oligonucleotide
  X-linked inhibitor of apoptosis (XIAP) siRNA
gctatgatcatggcactgcattc

SEQ ID NO: 17165 - DNA, 23 bp, Artificial Sequence
  Description of Artificial Sequence: Synthetic oligonucleotide
  X-linked inhibitor of apoptosis (XIAP) siRNA
ctatgatcatggcactgcattcc

SEQ ID NO: 17166 - DNA, 23 bp, Artificial Sequence
  Description of Artificial Sequence: Synthetic oligonucleotide
  X-linked inhibitor of apoptosis (XIAP) siRNA
tatgatcatggcactgcattcca

SEQ ID NO: 17167 - DNA, 23 bp, Artificial Sequence
  Description of Artificial Sequence: Synthetic oligonucleotide
  X-linked inhibitor of apoptosis (XIAP) siRNA
atgatcatggcactgcattccag

SEQ ID NO: 17168 - DNA, 23 bp, Artificial Sequence
  Description of Artificial Sequence: Synthetic oligonucleotide
  X-linked inhibitor of apoptosis (XIAP) siRNA
tgatcatggcactgcattccagc

SEQ ID NO: 17169 - DNA, 23 bp, Artificial Sequence
  Description of Artificial Sequence: Synthetic oligonucleotide
  X-linked inhibitor of apoptosis (XIAP) siRNA
gatcatggcactgcattccagcc

SEQ ID NO: 17170 - DNA, 23 bp, Artificial Sequence
  Description of Artificial Sequence: Synthetic oligonucleotide
  X-linked inhibitor of apoptosis (XIAP) siRNA
atcatggcactgcattccagcct

SEQ ID NO: 17171 - DNA, 23 bp, Artificial Sequence
  Description of Artificial Sequence: Synthetic oligonucleotide
  X-linked inhibitor of apoptosis (XIAP) siRNA
tcatggcactgcattccagcctg

SEQ ID NO: 17172 - DNA, 23 bp, Artificial Sequence
  Description of Artificial Sequence: Synthetic oligonucleotide
  X-linked inhibitor of apoptosis (XIAP) siRNA
catggcactgcattccagcctgg

SEQ ID NO: 17173 - DNA, 23 bp, Artificial Sequence
  Description of Artificial Sequence: Synthetic oligonucleotide
  X-linked inhibitor of apoptosis (XIAP) siRNA
atggcactgcattccagcctggg

SEQ ID NO: 17174 - DNA, 23 bp, Artificial Sequence
  Description of Artificial Sequence: Synthetic oligonucleotide
  X-linked inhibitor of apoptosis (XIAP) siRNA
tggcactgcattccagcctgggt

SEQ ID NO: 17175 - DNA, 23 bp, Artificial Sequence
  Description of Artificial Sequence: Synthetic oligonucleotide
  X-linked inhibitor of apoptosis (XIAP) siRNA
ggcactgcattccagcctgggtg

SEQ ID NO: 17176 - DNA, 23 bp, Artificial Sequence
  Description of Artificial Sequence: Synthetic oligonucleotide
  X-linked inhibitor of apoptosis (XIAP) siRNA
gcactgcattccagcctgggtga

SEQ ID NO: 17177 - DNA, 23 bp, Artificial Sequence
  Description of Artificial Sequence: Synthetic oligonucleotide
  X-linked inhibitor of apoptosis (XIAP) siRNA
cactgcattccagcctgggtgac

SEQ ID NO: 17178 - DNA, 23 bp, Artificial Sequence
  Description of Artificial Sequence: Synthetic oligonucleotide
  X-linked inhibitor of apoptosis (XIAP) siRNA
actgcattccagcctgggtgaca

SEQ ID NO: 17179 - DNA, 23 bp, Artificial Sequence
  Description of Artificial Sequence: Synthetic oligonucleotide
  X-linked inhibitor of apoptosis (XIAP) siRNA
ctgcattccagcctgggtgacag

SEQ ID NO: 17180 - DNA, 23 bp, Artificial Sequence
  Description of Artificial Sequence: Synthetic oligonucleotide
  X-linked inhibitor of apoptosis (XIAP) siRNA
tgcattccagcctgggtgacagt

SEQ ID NO: 17181 - DNA, 23 bp, Artificial Sequence
  Description of Artificial Sequence: Synthetic oligonucleotide
  X-linked inhibitor of apoptosis (XIAP) siRNA
gcattccagcctgggtgacagtg

SEQ ID NO: 17182 - DNA, 23 bp, Artificial Sequence
  Description of Artificial Sequence: Synthetic oligonucleotide
  X-linked inhibitor of apoptosis (XIAP) siRNA
cattccagcctgggtgacagtgc

SEQ ID NO: 17183 - DNA, 23 bp, Artificial Sequence
  Description of Artificial Sequence: Synthetic oligonucleotide
  X-linked inhibitor of apoptosis (XIAP) siRNA
attccagcctgggtgacagtgca

SEQ ID NO: 17184 - DNA, 23 bp, Artificial Sequence
  Description of Artificial Sequence: Synthetic oligonucleotide
  X-linked inhibitor of apoptosis (XIAP) siRNA
ttccagcctgggtgacagtgcaa

SEQ ID NO: 17185 - DNA, 23 bp, Artificial Sequence
  Description of Artificial Sequence: Synthetic oligonucleotide
  X-linked inhibitor of apoptosis (XIAP) siRNA
tccagcctgggtgacagtgcaag

SEQ ID NO: 17186 - DNA, 23 bp, Artificial Sequence
  Description of Artificial Sequence: Synthetic oligonucleotide
  X-linked inhibitor of apoptosis (XIAP) siRNA
ccagcctgggtgacagtgcaaga

SEQ ID NO: 17187 - DNA, 23 bp, Artificial Sequence
  Description of Artificial Sequence: Synthetic oligonucleotide
  X-linked inhibitor of apoptosis (XIAP) siRNA
cagcctgggtgacagtgcaagac

SEQ ID NO: 17188 - DNA, 23 bp, Artificial Sequence
  Description of Artificial Sequence: Synthetic oligonucleotide
  X-linked inhibitor of apoptosis (XIAP) siRNA
agcctgggtgacagtgcaagacc

SEQ ID NO: 17189 - DNA, 23 bp, Artificial Sequence
  Description of Artificial Sequence: Synthetic oligonucleotide
  X-linked inhibitor of apoptosis (XIAP) siRNA
gcctgggtgacagtgcaagacct

SEQ ID NO: 17190 - DNA, 23 bp, Artificial Sequence
  Description of Artificial Sequence: Synthetic oligonucleotide
  X-linked inhibitor of apoptosis (XIAP) siRNA
cctgggtgacagtgcaagacctt

SEQ ID NO: 17191 - DNA, 23 bp, Artificial Sequence
  Description of Artificial Sequence: Synthetic oligonucleotide
  X-linked inhibitor of apoptosis (XIAP) siRNA
ctgggtgacagtgcaagaccttg

SEQ ID NO: 17192 - DNA, 23 bp, Artificial Sequence
  Description of Artificial Sequence: Synthetic oligonucleotide
  X-linked inhibitor of apoptosis (XIAP) siRNA
tgggtgacagtgcaagaccttgt

SEQ ID NO: 17193 - DNA, 23 bp, Artificial Sequence
  Description of Artificial Sequence: Synthetic oligonucleotide
  X-linked inhibitor of apoptosis (XIAP) siRNA
gggtgacagtgcaagaccttgtc

SEQ ID NO: 17194 - DNA, 23 bp, Artificial Sequence
  Description of Artificial Sequence: Synthetic oligonucleotide
  X-linked inhibitor of apoptosis (XIAP) siRNA
ggtgacagtgcaagaccttgtct

SEQ ID NO: 17195 - DNA, 23 bp, Artificial Sequence
  Description of Artificial Sequence: Synthetic oligonucleotide
  X-linked inhibitor of apoptosis (XIAP) siRNA
gtgacagtgcaagaccttgtctc

SEQ ID NO: 17196 - DNA, 23 bp, Artificial Sequence
  Description of Artificial Sequence: Synthetic oligonucleotide
  X-linked inhibitor of apoptosis (XIAP) siRNA
tgacagtgcaagaccttgtctca

SEQ ID NO: 17197 - DNA, 23 bp, Artificial Sequence
  Description of Artificial Sequence: Synthetic oligonucleotide
  X-linked inhibitor of apoptosis (XIAP) siRNA
gacagtgcaagaccttgtctcag

SEQ ID NO: 17198 - DNA, 23 bp, Artificial Sequence
  Description of Artificial Sequence: Synthetic oligonucleotide
  X-linked inhibitor of apoptosis (XIAP) siRNA
acagtgcaagaccttgtctcaga

SEQ ID NO: 17199 - DNA, 23 bp, Artificial Sequence
  Description of Artificial Sequence: Synthetic oligonucleotide
  X-linked inhibitor of apoptosis (XIAP) siRNA
cagtgcaagaccttgtctcagaa

SEQ ID NO: 17200 - DNA, 23 bp, Artificial Sequence
  Description of Artificial Sequence: Synthetic oligonucleotide
  X-linked inhibitor of apoptosis (XIAP) siRNA
agtgcaagaccttgtctcagaat

SEQ ID NO: 17201 - DNA, 23 bp, Artificial Sequence
  Description of Artificial Sequence: Synthetic oligonucleotide
  X-linked inhibitor of apoptosis (XIAP) siRNA
gtgcaagaccttgtctcagaata

SEQ ID NO: 17202 - DNA, 23 bp, Artificial Sequence
  Description of Artificial Sequence: Synthetic oligonucleotide
  X-linked inhibitor of apoptosis (XIAP) siRNA
tgcaagaccttgtctcagaataa

SEQ ID NO: 17203 - DNA, 23 bp, Artificial Sequence
  Description of Artificial Sequence: Synthetic oligonucleotide
  X-linked inhibitor of apoptosis (XIAP) siRNA
gcaagaccttgtctcagaataaa

SEQ ID NO: 17204 - DNA, 23 bp, Artificial Sequence
  Description of Artificial Sequence: Synthetic oligonucleotide
  X-linked inhibitor of apoptosis (XIAP) siRNA
caagaccttgtctcagaataaat

SEQ ID NO: 17205 - DNA, 23 bp, Artificial Sequence
  Description of Artificial Sequence: Synthetic oligonucleotide
  X-linked inhibitor of apoptosis (XIAP) siRNA
aagaccttgtctcagaataaata

SEQ ID NO: 17206 - DNA, 23 bp, Artificial Sequence
  Description of Artificial Sequence: Synthetic oligonucleotide
  X-linked inhibitor of apoptosis (XIAP) siRNA
agaccttgtctcagaataaataa

SEQ ID NO: 17207 - DNA, 23 bp, Artificial Sequence
  Description of Artificial Sequence: Synthetic oligonucleotide
  X-linked inhibitor of apoptosis (XIAP) siRNA
gaccttgtctcagaataaataaa

SEQ ID NO: 17208 - DNA, 23 bp, Artificial Sequence
  Description of Artificial Sequence: Synthetic oligonucleotide
  X-linked inhibitor of apoptosis (XIAP) siRNA
accttgtctcagaataaataaag

SEQ ID NO: 17209 - DNA, 23 bp, Artificial Sequence
  Description of Artificial Sequence: Synthetic oligonucleotide
  X-linked inhibitor of apoptosis (XIAP) siRNA
ccttgtctcagaataaataaagt

SEQ ID NO: 17210 - DNA, 23 bp, Artificial Sequence
  Description of Artificial Sequence: Synthetic oligonucleotide
  X-linked inhibitor of apoptosis (XIAP) siRNA
cttgtctcagaataaataaagta

SEQ ID NO: 17211 - DNA, 23 bp, Artificial Sequence
  Description of Artificial Sequence: Synthetic oligonucleotide
  X-linked inhibitor of apoptosis (XIAP) siRNA
ttgtctcagaataaataaagtat

SEQ ID NO: 17212 - DNA, 23 bp, Artificial Sequence
  Description of Artificial Sequence: Synthetic oligonucleotide
  X-linked inhibitor of apoptosis (XIAP) siRNA
tgtctcagaataaataaagtatg

SEQ ID NO: 17213 - DNA, 23 bp, Artificial Sequence
  Description of Artificial Sequence: Synthetic oligonucleotide
  X-linked inhibitor of apoptosis (XIAP) siRNA
gtctcagaataaataaagtatgt

SEQ ID NO: 17214 - DNA, 23 bp, Artificial Sequence
  Description of Artificial Sequence: Synthetic oligonucleotide
  X-linked inhibitor of apoptosis (XIAP) siRNA
tctcagaataaataaagtatgtg

SEQ ID NO: 17215 - DNA, 23 bp, Artificial Sequence
  Description of Artificial Sequence: Synthetic oligonucleotide
  X-linked inhibitor of apoptosis (XIAP) siRNA
ctcagaataaataaagtatgtga

SEQ ID NO: 17216 - DNA, 23 bp, Artificial Sequence
  Description of Artificial Sequence: Synthetic oligonucleotide
  X-linked inhibitor of apoptosis (XIAP) siRNA
tcagaataaataaagtatgtgat

SEQ ID NO: 17217 - DNA, 23 bp, Artificial Sequence
  Description of Artificial Sequence: Synthetic oligonucleotide
  X-linked inhibitor of apoptosis (XIAP) siRNA
cagaataaataaagtatgtgatg

SEQ ID NO: 17218 - DNA, 23 bp, Artificial Sequence
  Description of Artificial Sequence: Synthetic oligonucleotide
  X-linked inhibitor of apoptosis (XIAP) siRNA
agaataaataaagtatgtgatga

SEQ ID NO: 17219 - DNA, 23 bp, Artificial Sequence
  Description of Artificial Sequence: Synthetic oligonucleotide
  X-linked inhibitor of apoptosis (XIAP) siRNA
gaataaataaagtatgtgatgaa

SEQ ID NO: 17220 - DNA, 23 bp, Artificial Sequence
  Description of Artificial Sequence: Synthetic oligonucleotide
  X-linked inhibitor of apoptosis (XIAP) siRNA
aataaataaagtatgtgatgaag

SEQ ID NO: 17221 - DNA, 23 bp, Artificial Sequence
  Description of Artificial Sequence: Synthetic oligonucleotide
  X-linked inhibitor of apoptosis (XIAP) siRNA
ataaataaagtatgtgatgaaga

SEQ ID NO: 17222 - DNA, 23 bp, Artificial Sequence
  Description of Artificial Sequence: Synthetic oligonucleotide
  X-linked inhibitor of apoptosis (XIAP) siRNA
taaataaagtatgtgatgaagat

SEQ ID NO: 17223 - DNA, 23 bp, Artificial Sequence
  Description of Artificial Sequence: Synthetic oligonucleotide
  X-linked inhibitor of apoptosis (XIAP) siRNA
aaataaagtatgtgatgaagatg

SEQ ID NO: 17224 - DNA, 23 bp, Artificial Sequence
  Description of Artificial Sequence: Synthetic oligonucleotide
  X-linked inhibitor of apoptosis (XIAP) siRNA
aataaagtatgtgatgaagatgt

SEQ ID NO: 17225 - DNA, 23 bp, Artificial Sequence
  Description of Artificial Sequence: Synthetic oligonucleotide
  X-linked inhibitor of apoptosis (XIAP) siRNA
ataaagtatgtgatgaagatgtg

SEQ ID NO: 17226 - DNA, 23 bp, Artificial Sequence
  Description of Artificial Sequence: Synthetic oligonucleotide
  X-linked inhibitor of apoptosis (XIAP) siRNA
taaagtatgtgatgaagatgtgc

SEQ ID NO: 17227 - DNA, 23 bp, Artificial Sequence
  Description of Artificial Sequence: Synthetic oligonucleotide
  X-linked inhibitor of apoptosis (XIAP) siRNA
aaagtatgtgatgaagatgtgca

SEQ ID NO: 17228 - DNA, 23 bp, Artificial Sequence
  Description of Artificial Sequence: Synthetic oligonucleotide
  X-linked inhibitor of apoptosis (XIAP) siRNA
aagtatgtgatgaagatgtgcat

SEQ ID NO: 17229 - DNA, 23 bp, Artificial Sequence
  Description of Artificial Sequence: Synthetic oligonucleotide
  X-linked inhibitor of apoptosis (XIAP) siRNA
agtatgtgatgaagatgtgcata

SEQ ID NO: 17230 - DNA, 23 bp, Artificial Sequence
  Description of Artificial Sequence: Synthetic oligonucleotide
  X-linked inhibitor of apoptosis (XIAP) siRNA
gtatgtgatgaagatgtgcatac

SEQ ID NO: 17231 - DNA, 23 bp, Artificial Sequence
  Description of Artificial Sequence: Synthetic oligonucleotide
  X-linked inhibitor of apoptosis (XIAP) siRNA
tatgtgatgaagatgtgcataca

SEQ ID NO: 17232 - DNA, 23 bp, Artificial Sequence
  Description of Artificial Sequence: Synthetic oligonucleotide
  X-linked inhibitor of apoptosis (XIAP) siRNA
atgtgatgaagatgtgcatacat

SEQ ID NO: 17233 - DNA, 23 bp, Artificial Sequence
  Description of Artificial Sequence: Synthetic oligonucleotide
  X-linked inhibitor of apoptosis (XIAP) siRNA
tgtgatgaagatgtgcatacatt

SEQ ID NO: 17234 - DNA, 23 bp, Artificial Sequence
  Description of Artificial Sequence: Synthetic oligonucleotide
  X-linked inhibitor of apoptosis (XIAP) siRNA
gtgatgaagatgtgcatacatta

SEQ ID NO: 17235 - DNA, 23 bp, Artificial Sequence
  Description of Artificial Sequence: Synthetic oligonucleotide
  X-linked inhibitor of apoptosis (XIAP) siRNA
tgatgaagatgtgcatacattat

SEQ ID NO: 17236 - DNA, 23 bp, Artificial Sequence
  Description of Artificial Sequence: Synthetic oligonucleotide
  X-linked inhibitor of apoptosis (XIAP) siRNA
gatgaagatgtgcatacattata

SEQ ID NO: 17237 - DNA, 23 bp, Artificial Sequence
  Description of Artificial Sequence: Synthetic oligonucleotide
  X-linked inhibitor of apoptosis (XIAP) siRNA
atgaagatgtgcatacattatat

SEQ ID NO: 17238 - DNA, 23 bp, Artificial Sequence
  Description of Artificial Sequence: Synthetic oligonucleotide
  X-linked inhibitor of apoptosis (XIAP) siRNA
tgaagatgtgcatacattatatg

SEQ ID NO: 17239 - DNA, 23 bp, Artificial Sequence
  Description of Artificial Sequence: Synthetic oligonucleotide
  X-linked inhibitor of apoptosis (XIAP) siRNA
gaagatgtgcatacattatatgc

SEQ ID NO: 17240 - DNA, 23 bp, Artificial Sequence
  Description of Artificial Sequence: Synthetic oligonucleotide
  X-linked inhibitor of apoptosis (XIAP) siRNA
aagatgtgcatacattatatgca

SEQ ID NO: 17241 - DNA, 23 bp, Artificial Sequence
  Description of Artificial Sequence: Synthetic oligonucleotide
  X-linked inhibitor of apoptosis (XIAP) siRNA
agatgtgcatacattatatgcaa

SEQ ID NO: 17242 - DNA, 23 bp, Artificial Sequence
  Description of Artificial Sequence: Synthetic oligonucleotide
  X-linked inhibitor of apoptosis (XIAP) siRNA
gatgtgcatacattatatgcaaa

SEQ ID NO: 17243 - DNA, 23 bp, Artificial Sequence
  Description of Artificial Sequence: Synthetic oligonucleotide
  X-linked inhibitor of apoptosis (XIAP) siRNA
atgtgcatacattatatgcaaat

SEQ ID NO: 17244 - DNA, 23 bp, Artificial Sequence
  Description of Artificial Sequence: Synthetic oligonucleotide
  X-linked inhibitor of apoptosis (XIAP) siRNA
tgtgcatacattatatgcaaata

SEQ ID NO: 17245 - DNA, 23 bp, Artificial Sequence
  Description of Artificial Sequence: Synthetic oligonucleotide
  X-linked inhibitor of apoptosis (XIAP) siRNA
gtgcatacattatatgcaaatac

SEQ ID NO: 17246 - DNA, 23 bp, Artificial Sequence
  Description of Artificial Sequence: Synthetic oligonucleotide
  X-linked inhibitor of apoptosis (XIAP) siRNA
tgcatacattatatgcaaatact

SEQ ID NO: 17247 - DNA, 23 bp, Artificial Sequence
  Description of Artificial Sequence: Synthetic oligonucleotide
  X-linked inhibitor of apoptosis (XIAP) siRNA
gcatacattatatgcaaatactg

SEQ ID NO: 17248 - DNA, 23 bp, Artificial Sequence
  Description of Artificial Sequence: Synthetic oligonucleotide
  X-linked inhibitor of apoptosis (XIAP) siRNA
catacattatatgcaaatactgt

SEQ ID NO: 17249 - DNA, 23 bp, Artificial Sequence
  Description of Artificial Sequence: Synthetic oligonucleotide
  X-linked inhibitor of apoptosis (XIAP) siRNA
atacattatatgcaaatactgtt

SEQ ID NO: 17250 - DNA, 23 bp, Artificial Sequence
  Description of Artificial Sequence: Synthetic oligonucleotide
  X-linked inhibitor of apoptosis (XIAP) siRNA
tacattatatgcaaatactgttt

SEQ ID NO: 17251 - DNA, 23 bp, Artificial Sequence
  Description of Artificial Sequence: Synthetic oligonucleotide
  X-linked inhibitor of apoptosis (XIAP) siRNA
acattatatgcaaatactgtttt

SEQ ID NO: 17252 - DNA, 23 bp, Artificial Sequence
  Description of Artificial Sequence: Synthetic oligonucleotide
  X-linked inhibitor of apoptosis (XIAP) siRNA
cattatatgcaaatactgttttt

SEQ ID NO: 17253 - DNA, 23 bp, Artificial Sequence
  Description of Artificial Sequence: Synthetic oligonucleotide
  X-linked inhibitor of apoptosis (XIAP) siRNA
attatatgcaaatactgtttttt

SEQ ID NO: 17254 - DNA, 23 bp, Artificial Sequence
  Description of Artificial Sequence: Synthetic oligonucleotide
  X-linked inhibitor of apoptosis (XIAP) siRNA
ttatatgcaaatactgttttttt

SEQ ID NO: 17255 - DNA, 23 bp, Artificial Sequence
  Description of Artificial Sequence: Synthetic oligonucleotide
  X-linked inhibitor of apoptosis (XIAP) siRNA
tatatgcaaatactgtttttttt

SEQ ID NO: 17256 - DNA, 23 bp, Artificial Sequence
  Description of Artificial Sequence: Synthetic oligonucleotide
  X-linked inhibitor of apoptosis (XIAP) siRNA
ttttttttaatttaaacagtctc

SEQ ID NO: 17257 - DNA, 23 bp, Artificial Sequence
  Description of Artificial Sequence: Synthetic oligonucleotide
  X-linked inhibitor of apoptosis (XIAP) siRNA
tttttttaatttaaacagtctca

SEQ ID NO: 17258 - DNA, 23 bp, Artificial Sequence
  Description of Artificial Sequence: Synthetic oligonucleotide
  X-linked inhibitor of apoptosis (XIAP) siRNA
ttttttaatttaaacagtctcac

SEQ ID NO: 17259 - DNA, 23 bp, Artificial Sequence
  Description of Artificial Sequence: Synthetic oligonucleotide
  X-linked inhibitor of apoptosis (XIAP) siRNA
tttttaatttaaacagtctcact

SEQ ID NO: 17260 - DNA, 23 bp, Artificial Sequence
  Description of Artificial Sequence: Synthetic oligonucleotide
  X-linked inhibitor of apoptosis (XIAP) siRNA
ttttaatttaaacagtctcactg

SEQ ID NO: 17261 - DNA, 23 bp, Artificial Sequence
  Description of Artificial Sequence: Synthetic oligonucleotide
  X-linked inhibitor of apoptosis (XIAP) siRNA
tttaatttaaacagtctcactgt

SEQ ID NO: 17262 - DNA, 23 bp, Artificial Sequence
  Description of Artificial Sequence: Synthetic oligonucleotide
  X-linked inhibitor of apoptosis (XIAP) siRNA
ttaatttaaacagtctcactgtg

SEQ ID NO: 17263 - DNA, 23 bp, Artificial Sequence
  Description of Artificial Sequence: Synthetic oligonucleotide
  X-linked inhibitor of apoptosis (XIAP) siRNA
taatttaaacagtctcactgtgt

SEQ ID NO: 17264 - DNA, 23 bp, Artificial Sequence
  Description of Artificial Sequence: Synthetic oligonucleotide
  X-linked inhibitor of apoptosis (XIAP) siRNA
aatttaaacagtctcactgtgtt

SEQ ID NO: 17265 - DNA, 23 bp, Artificial Sequence
  Description of Artificial Sequence: Synthetic oligonucleotide
  X-linked inhibitor of apoptosis (XIAP) siRNA
atttaaacagtctcactgtgttg

SEQ ID NO: 17266 - DNA, 23 bp, Artificial Sequence
  Description of Artificial Sequence: Synthetic oligonucleotide
  X-linked inhibitor of apoptosis (XIAP) siRNA
tttaaacagtctcactgtgttgc

SEQ ID NO: 17267 - DNA, 23 bp, Artificial Sequence
  Description of Artificial Sequence: Synthetic oligonucleotide
  X-linked inhibitor of apoptosis (XIAP) siRNA
ttaaacagtctcactgtgttgcc

SEQ ID NO: 17268 - DNA, 23 bp, Artificial Sequence
  Description of Artificial Sequence: Synthetic oligonucleotide
  X-linked inhibitor of apoptosis (XIAP) siRNA
taaacagtctcactgtgttgccc

SEQ ID NO: 17269 - DNA, 23 bp, Artificial Sequence
  Description of Artificial Sequence: Synthetic oligonucleotide
  X-linked inhibitor of apoptosis (XIAP) siRNA
aaacagtctcactgtgttgccca

SEQ ID NO: 17270 - DNA, 23 bp, Artificial Sequence
  Description of Artificial Sequence: Synthetic oligonucleotide
  X-linked inhibitor of apoptosis (XIAP) siRNA
aacagtctcactgtgttgcccag

SEQ ID NO: 17271 - DNA, 23 bp, Artificial Sequence
  Description of Artificial Sequence: Synthetic oligonucleotide
  X-linked inhibitor of apoptosis (XIAP) siRNA
acagtctcactgtgttgcccagg

SEQ ID NO: 17272 - DNA, 23 bp, Artificial Sequence
  Description of Artificial Sequence: Synthetic oligonucleotide
  X-linked inhibitor of apoptosis (XIAP) siRNA
cagtctcactgtgttgcccagga

SEQ ID NO: 17273 - DNA, 23 bp, Artificial Sequence
  Description of Artificial Sequence: Synthetic oligonucleotide
  X-linked inhibitor of apoptosis (XIAP) siRNA
agtctcactgtgttgcccaggat

SEQ ID NO: 17274 - DNA, 23 bp, Artificial Sequence
  Description of Artificial Sequence: Synthetic oligonucleotide
  X-linked inhibitor of apoptosis (XIAP) siRNA
gtctcactgtgttgcccaggatg

SEQ ID NO: 17275 - DNA, 23 bp, Artificial Sequence
  Description of Artificial Sequence: Synthetic oligonucleotide
  X-linked inhibitor of apoptosis (XIAP) siRNA
tctcactgtgttgcccaggatgg

SEQ ID NO: 17276 - DNA, 23 bp, Artificial Sequence
  Description of Artificial Sequence: Synthetic oligonucleotide
  X-linked inhibitor of apoptosis (XIAP) siRNA
ctcactgtgttgcccaggatgga

SEQ ID NO: 17277 - DNA, 23 bp, Artificial Sequence
  Description of Artificial Sequence: Synthetic oligonucleotide
  X-linked inhibitor of apoptosis (XIAP) siRNA
tcactgtgttgcccaggatggag

SEQ ID NO: 17278 - DNA, 23 bp, Artificial Sequence
  Description of Artificial Sequence: Synthetic oligonucleotide
  X-linked inhibitor of apoptosis (XIAP) siRNA
cactgtgttgcccaggatggagt

SEQ ID NO: 17279 - DNA, 23 bp, Artificial Sequence
  Description of Artificial Sequence: Synthetic oligonucleotide
  X-linked inhibitor of apoptosis (XIAP) siRNA
actgtgttgcccaggatggagtg

SEQ ID NO: 17280 - DNA, 23 bp, Artificial Sequence
  Description of Artificial Sequence: Synthetic oligonucleotide
  X-linked inhibitor of apoptosis (XIAP) siRNA
ctgtgttgcccaggatggagtgc

SEQ ID NO: 17281 - DNA, 23 bp, Artificial Sequence
  Description of Artificial Sequence: Synthetic oligonucleotide
  X-linked inhibitor of apoptosis (XIAP) siRNA
tgtgttgcccaggatggagtgca

SEQ ID NO: 17282 - DNA, 23 bp, Artificial Sequence
  Description of Artificial Sequence: Synthetic oligonucleotide
  X-linked inhibitor of apoptosis (XIAP) siRNA
gtgttgcccaggatggagtgcaa

SEQ ID NO: 17283 - DNA, 23 bp, Artificial Sequence
  Description of Artificial Sequence: Synthetic oligonucleotide
  X-linked inhibitor of apoptosis (XIAP) siRNA
tgttgcccaggatggagtgcaat

SEQ ID NO: 17284 - DNA, 23 bp, Artificial Sequence
  Description of Artificial Sequence: Synthetic oligonucleotide
  X-linked inhibitor of apoptosis (XIAP) siRNA
gttgcccaggatggagtgcaatg

SEQ ID NO: 17285 - DNA, 23 bp, Artificial Sequence
  Description of Artificial Sequence: Synthetic oligonucleotide
  X-linked inhibitor of apoptosis (XIAP) siRNA
ttgcccaggatggagtgcaatgg

SEQ ID NO: 17286 - DNA, 23 bp, Artificial Sequence
  Description of Artificial Sequence: Synthetic oligonucleotide
  X-linked inhibitor of apoptosis (XIAP) siRNA
tgcccaggatggagtgcaatggc

SEQ ID NO: 17287 - DNA, 23 bp, Artificial Sequence
  Description of Artificial Sequence: Synthetic oligonucleotide
  X-linked inhibitor of apoptosis (XIAP) siRNA
gcccaggatggagtgcaatggca

SEQ ID NO: 17288 - DNA, 23 bp, Artificial Sequence
  Description of Artificial Sequence: Synthetic oligonucleotide
  X-linked inhibitor of apoptosis (XIAP) siRNA
cccaggatggagtgcaatggcac

SEQ ID NO: 17289 - DNA, 23 bp, Artificial Sequence
  Description of Artificial Sequence: Synthetic oligonucleotide
  X-linked inhibitor of apoptosis (XIAP) siRNA
ccaggatggagtgcaatggcaca

SEQ ID NO: 17290 - DNA, 23 bp, Artificial Sequence
  Description of Artificial Sequence: Synthetic oligonucleotide
  X-linked inhibitor of apoptosis (XIAP) siRNA
caggatggagtgcaatggcacaa

SEQ ID NO: 17291 - DNA, 23 bp, Artificial Sequence
  Description of Artificial Sequence: Synthetic oligonucleotide
  X-linked inhibitor of apoptosis (XIAP) siRNA
aggatggagtgcaatggcacaat

SEQ ID NO: 17292 - DNA, 23 bp, Artificial Sequence
  Description of Artificial Sequence: Synthetic oligonucleotide
  X-linked inhibitor of apoptosis (XIAP) siRNA
ggatggagtgcaatggcacaatc

SEQ ID NO: 17293 - DNA, 23 bp, Artificial Sequence
  Description of Artificial Sequence: Synthetic oligonucleotide
  X-linked inhibitor of apoptosis (XIAP) siRNA
gatggagtgcaatggcacaatct

SEQ ID NO: 17294 - DNA, 23 bp, Artificial Sequence
  Description of Artificial Sequence: Synthetic oligonucleotide
  X-linked inhibitor of apoptosis (XIAP) siRNA
atggagtgcaatggcacaatctt

SEQ ID NO: 17295 - DNA, 23 bp, Artificial Sequence
  Description of Artificial Sequence: Synthetic oligonucleotide
  X-linked inhibitor of apoptosis (XIAP) siRNA
tggagtgcaatggcacaatcttg

SEQ ID NO: 17296 - DNA, 23 bp, Artificial Sequence
  Description of Artificial Sequence: Synthetic oligonucleotide
  X-linked inhibitor of apoptosis (XIAP) siRNA
ggagtgcaatggcacaatcttgg

SEQ ID NO: 17297 - DNA, 23 bp, Artificial Sequence
  Description of Artificial Sequence: Synthetic oligonucleotide
  X-linked inhibitor of apoptosis (XIAP) siRNA
gagtgcaatggcacaatcttggc

SEQ ID NO: 17298 - DNA, 23 bp, Artificial Sequence
  Description of Artificial Sequence: Synthetic oligonucleotide
  X-linked inhibitor of apoptosis (XIAP) siRNA
agtgcaatggcacaatcttggct

SEQ ID NO: 17299 - DNA, 23 bp, Artificial Sequence
  Description of Artificial Sequence: Synthetic oligonucleotide
  X-linked inhibitor of apoptosis (XIAP) siRNA
gtgcaatggcacaatcttggctc

SEQ ID NO: 17300 - DNA, 23 bp, Artificial Sequence
  Description of Artificial Sequence: Synthetic oligonucleotide
  X-linked inhibitor of apoptosis (XIAP) siRNA
tgcaatggcacaatcttggctca

SEQ ID NO: 17301 - DNA, 23 bp, Artificial Sequence
  Description of Artificial Sequence: Synthetic oligonucleotide
  X-linked inhibitor of apoptosis (XIAP) siRNA
gcaatggcacaatcttggctcat

SEQ ID NO: 17302 - DNA, 23 bp, Artificial Sequence
  Description of Artificial Sequence: Synthetic oligonucleotide
  X-linked inhibitor of apoptosis (XIAP) siRNA
caatggcacaatcttggctcatg

SEQ ID NO: 17303 - DNA, 23 bp, Artificial Sequence
  Description of Artificial Sequence: Synthetic oligonucleotide
  X-linked inhibitor of apoptosis (XIAP) siRNA
aatggcacaatcttggctcatgg

SEQ ID NO: 17304 - DNA, 23 bp, Artificial Sequence
  Description of Artificial Sequence: Synthetic oligonucleotide
  X-linked inhibitor of apoptosis (XIAP) siRNA
atggcacaatcttggctcatggc

SEQ ID NO: 17305 - DNA, 23 bp, Artificial Sequence
  Description of Artificial Sequence: Synthetic oligonucleotide
  X-linked inhibitor of apoptosis (XIAP) siRNA
tggcacaatcttggctcatggca

SEQ ID NO: 17306 - DNA, 23 bp, Artificial Sequence
  Description of Artificial Sequence: Synthetic oligonucleotide
  X-linked inhibitor of apoptosis (XIAP) siRNA
ggcacaatcttggctcatggcaa

SEQ ID NO: 17307 - DNA, 23 bp, Artificial Sequence
  Description of Artificial Sequence: Synthetic oligonucleotide
  X-linked inhibitor of apoptosis (XIAP) siRNA
gcacaatcttggctcatggcaaa

SEQ ID NO: 17308 - DNA, 23 bp, Artificial Sequence
  Description of Artificial Sequence: Synthetic oligonucleotide
  X-linked inhibitor of apoptosis (XIAP) siRNA
cacaatcttggctcatggcaaac

SEQ ID NO: 17309 - DNA, 23 bp, Artificial Sequence
  Description of Artificial Sequence: Synthetic oligonucleotide
  X-linked inhibitor of apoptosis (XIAP) siRNA
acaatcttggctcatggcaaact

SEQ ID NO: 17310 - DNA, 23 bp, Artificial Sequence
  Description of Artificial Sequence: Synthetic oligonucleotide
  X-linked inhibitor of apoptosis (XIAP) siRNA
caatcttggctcatggcaaactc

SEQ ID NO: 17311 - DNA, 23 bp, Artificial Sequence
  Description of Artificial Sequence: Synthetic oligonucleotide
  X-linked inhibitor of apoptosis (XIAP) siRNA
aatcttggctcatggcaaactct

SEQ ID NO: 17312 - DNA, 23 bp, Artificial Sequence
  Description of Artificial Sequence: Synthetic oligonucleotide
  X-linked inhibitor of apoptosis (XIAP) siRNA
atcttggctcatggcaaactctg

SEQ ID NO: 17313 - DNA, 23 bp, Artificial Sequence
  Description of Artificial Sequence: Synthetic oligonucleotide
  X-linked inhibitor of apoptosis (XIAP) siRNA
tcttggctcatggcaaactctgc

SEQ ID NO: 17314 - DNA, 23 bp, Artificial Sequence
  Description of Artificial Sequence: Synthetic oligonucleotide
  X-linked inhibitor of apoptosis (XIAP) siRNA
cttggctcatggcaaactctgcc

SEQ ID NO: 17315 - DNA, 23 bp, Artificial Sequence
  Description of Artificial Sequence: Synthetic oligonucleotide
  X-linked inhibitor of apoptosis (XIAP) siRNA
ttggctcatggcaaactctgcct

SEQ ID NO: 17316 - DNA, 23 bp, Artificial Sequence
  Description of Artificial Sequence: Synthetic oligonucleotide
  X-linked inhibitor of apoptosis (XIAP) siRNA
tggctcatggcaaactctgcctc

SEQ ID NO: 17317 - DNA, 23 bp, Artificial Sequence
  Description of Artificial Sequence: Synthetic oligonucleotide
  X-linked inhibitor of apoptosis (XIAP) siRNA
ggctcatggcaaactctgcctcg

SEQ ID NO: 17318 - DNA, 23 bp, Artificial Sequence
  Description of Artificial Sequence: Synthetic oligonucleotide
  X-linked inhibitor of apoptosis (XIAP) siRNA
gctcatggcaaactctgcctcgc

SEQ ID NO: 17319 - DNA, 23 bp, Artificial Sequence
  Description of Artificial Sequence: Synthetic oligonucleotide
  X-linked inhibitor of apoptosis (XIAP) siRNA
ctcatggcaaactctgcctcgca

SEQ ID NO: 17320 - DNA, 23 bp, Artificial Sequence
  Description of Artificial Sequence: Synthetic oligonucleotide
  X-linked inhibitor of apoptosis (XIAP) siRNA
tcatggcaaactctgcctcgcaa

SEQ ID NO: 17321 - DNA, 23 bp, Artificial Sequence
  Description of Artificial Sequence: Synthetic oligonucleotide
  X-linked inhibitor of apoptosis (XIAP) siRNA
catggcaaactctgcctcgcaag

SEQ ID NO: 17322 - DNA, 23 bp, Artificial Sequence
  Description of Artificial Sequence: Synthetic oligonucleotide
  X-linked inhibitor of apoptosis (XIAP) siRNA
atggcaaactctgcctcgcaagc

SEQ ID NO: 17323 - DNA, 23 bp, Artificial Sequence
  Description of Artificial Sequence: Synthetic oligonucleotide
  X-linked inhibitor of apoptosis (XIAP) siRNA
tggcaaactctgcctcgcaagca

SEQ ID NO: 17324 - DNA, 23 bp, Artificial Sequence
  Description of Artificial Sequence: Synthetic oligonucleotide
  X-linked inhibitor of apoptosis (XIAP) siRNA
ggcaaactctgcctcgcaagcag

SEQ ID NO: 17325 - DNA, 23 bp, Artificial Sequence
  Description of Artificial Sequence: Synthetic oligonucleotide
  X-linked inhibitor of apoptosis (XIAP) siRNA
gcaaactctgcctcgcaagcagc

SEQ ID NO: 17326 - DNA, 23 bp, Artificial Sequence
  Description of Artificial Sequence: Synthetic oligonucleotide
  X-linked inhibitor of apoptosis (XIAP) siRNA
caaactctgcctcgcaagcagct

SEQ ID NO: 17327 - DNA, 23 bp, Artificial Sequence
  Description of Artificial Sequence: Synthetic oligonucleotide
  X-linked inhibitor of apoptosis (XIAP) siRNA
aaactctgcctcgcaagcagctg

SEQ ID NO: 17328 - DNA, 23 bp, Artificial Sequence
  Description of Artificial Sequence: Synthetic oligonucleotide
  X-linked inhibitor of apoptosis (XIAP) siRNA
aactctgcctcgcaagcagctgg

SEQ ID NO: 17329 - DNA, 23 bp, Artificial Sequence
  Description of Artificial Sequence: Synthetic oligonucleotide
  X-linked inhibitor of apoptosis (XIAP) siRNA
actctgcctcgcaagcagctggg

SEQ ID NO: 17330 - DNA, 23 bp, Artificial Sequence
  Description of Artificial Sequence: Synthetic oligonucleotide
  X-linked inhibitor of apoptosis (XIAP) siRNA
ctctgcctcgcaagcagctggga

SEQ ID NO: 17331 - DNA, 23 bp, Artificial Sequence
  Description of Artificial Sequence: Synthetic oligonucleotide
  X-linked inhibitor of apoptosis (XIAP) siRNA
tctgcctcgcaagcagctgggac

SEQ ID NO: 17332 - DNA, 23 bp, Artificial Sequence
  Description of Artificial Sequence: Synthetic oligonucleotide
  X-linked inhibitor of apoptosis (XIAP) siRNA
ctgcctcgcaagcagctgggact

SEQ ID NO: 17333 - DNA, 23 bp, Artificial Sequence
  Description of Artificial Sequence: Synthetic oligonucleotide
  X-linked inhibitor of apoptosis (XIAP) siRNA
tgcctcgcaagcagctgggacta

SEQ ID NO: 17334 - DNA, 23 bp, Artificial Sequence
  Description of Artificial Sequence: Synthetic oligonucleotide
  X-linked inhibitor of apoptosis (XIAP) siRNA
gcctcgcaagcagctgggactac

SEQ ID NO: 17335 - DNA, 23 bp, Artificial Sequence
  Description of Artificial Sequence: Synthetic oligonucleotide
  X-linked inhibitor of apoptosis (XIAP) siRNA
cctcgcaagcagctgggactaca

SEQ ID NO: 17336 - DNA, 23 bp, Artificial Sequence
  Description of Artificial Sequence: Synthetic oligonucleotide
  X-linked inhibitor of apoptosis (XIAP) siRNA
ctcgcaagcagctgggactacag

SEQ ID NO: 17337 - DNA, 23 bp, Artificial Sequence
  Description of Artificial Sequence: Synthetic oligonucleotide
  X-linked inhibitor of apoptosis (XIAP) siRNA
tcgcaagcagctgggactacagg

SEQ ID NO: 17338 - DNA, 23 bp, Artificial Sequence
  Description of Artificial Sequence: Synthetic oligonucleotide
  X-linked inhibitor of apoptosis (XIAP) siRNA
cgcaagcagctgggactacaggc

SEQ ID NO: 17339 - DNA, 23 bp, Artificial Sequence
  Description of Artificial Sequence: Synthetic oligonucleotide
  X-linked inhibitor of apoptosis (XIAP) siRNA
gcaagcagctgggactacaggca

SEQ ID NO: 17340 - DNA, 23 bp, Artificial Sequence
  Description of Artificial Sequence: Synthetic oligonucleotide
  X-linked inhibitor of apoptosis (XIAP) siRNA
caagcagctgggactacaggcat

SEQ ID NO: 17341 - DNA, 23 bp, Artificial Sequence
  Description of Artificial Sequence: Synthetic oligonucleotide
  X-linked inhibitor of apoptosis (XIAP) siRNA
aagcagctgggactacaggcatg

SEQ ID NO: 17342 - DNA, 23 bp, Artificial Sequence
  Description of Artificial Sequence: Synthetic oligonucleotide
  X-linked inhibitor of apoptosis (XIAP) siRNA
agcagctgggactacaggcatgc

SEQ ID NO: 17343 - DNA, 23 bp, Artificial Sequence
  Description of Artificial Sequence: Synthetic oligonucleotide
  X-linked inhibitor of apoptosis (XIAP) siRNA
gcagctgggactacaggcatgct

SEQ ID NO: 17344 - DNA, 23 bp, Artificial Sequence
  Description of Artificial Sequence: Synthetic oligonucleotide
  X-linked inhibitor of apoptosis (XIAP) siRNA
cagctgggactacaggcatgctc

SEQ ID NO: 17345 - DNA, 23 bp, Artificial Sequence
  Description of Artificial Sequence: Synthetic oligonucleotide
  X-linked inhibitor of apoptosis (XIAP) siRNA
agctgggactacaggcatgctcc

SEQ ID NO: 17346 - DNA, 23 bp, Artificial Sequence
  Description of Artificial Sequence: Synthetic oligonucleotide
  X-linked inhibitor of apoptosis (XIAP) siRNA
gctgggactacaggcatgctcca

SEQ ID NO: 17347 - DNA, 23 bp, Artificial Sequence
  Description of Artificial Sequence: Synthetic oligonucleotide
  X-linked inhibitor of apoptosis (XIAP) siRNA
ctgggactacaggcatgctccac

SEQ ID NO: 17348 - DNA, 23 bp, Artificial Sequence
  Description of Artificial Sequence: Synthetic oligonucleotide
  X-linked inhibitor of apoptosis (XIAP) siRNA
tgggactacaggcatgctccacg

SEQ ID NO: 17349 - DNA, 23 bp, Artificial Sequence
  Description of Artificial Sequence: Synthetic oligonucleotide
  X-linked inhibitor of apoptosis (XIAP) siRNA
gggactacaggcatgctccacgg

SEQ ID NO: 17350 - DNA, 23 bp, Artificial Sequence
  Description of Artificial Sequence: Synthetic oligonucleotide
  X-linked inhibitor of apoptosis (XIAP) siRNA
ggactacaggcatgctccacggt

SEQ ID NO: 17351 - DNA, 23 bp, Artificial Sequence
  Description of Artificial Sequence: Synthetic oligonucleotide
  X-linked inhibitor of apoptosis (XIAP) siRNA
gactacaggcatgctccacggtg

SEQ ID NO: 17352 - DNA, 23 bp, Artificial Sequence
  Description of Artificial Sequence: Synthetic oligonucleotide
  X-linked inhibitor of apoptosis (XIAP) siRNA
actacaggcatgctccacggtgc

SEQ ID NO: 17353 - DNA, 23 bp, Artificial Sequence
  Description of Artificial Sequence: Synthetic oligonucleotide
  X-linked inhibitor of apoptosis (XIAP) siRNA
ctacaggcatgctccacggtgcc

SEQ ID NO: 17354 - DNA, 23 bp, Artificial Sequence
  Description of Artificial Sequence: Synthetic oligonucleotide
  X-linked inhibitor of apoptosis (XIAP) siRNA
tacaggcatgctccacggtgccc

SEQ ID NO: 17355 - DNA, 23 bp, Artificial Sequence
  Description of Artificial Sequence: Synthetic oligonucleotide
  X-linked inhibitor of apoptosis (XIAP) siRNA
acaggcatgctccacggtgccca

SEQ ID NO: 17356 - DNA, 23 bp, Artificial Sequence
  Description of Artificial Sequence: Synthetic oligonucleotide
  X-linked inhibitor of apoptosis (XIAP) siRNA
caggcatgctccacggtgcccag

SEQ ID NO: 17357 - DNA, 23 bp, Artificial Sequence
  Description of Artificial Sequence: Synthetic oligonucleotide
  X-linked inhibitor of apoptosis (XIAP) siRNA
aggcatgctccacggtgcccagt

SEQ ID NO: 17358 - DNA, 23 bp, Artificial Sequence
  Description of Artificial Sequence: Synthetic oligonucleotide
  X-linked inhibitor of apoptosis (XIAP) siRNA
ggcatgctccacggtgcccagtt

SEQ ID NO: 17359 - DNA, 23 bp, Artificial Sequence
  Description of Artificial Sequence: Synthetic oligonucleotide
  X-linked inhibitor of apoptosis (XIAP) siRNA
gcatgctccacggtgcccagtta

SEQ ID NO: 17360 - DNA, 23 bp, Artificial Sequence
  Description of Artificial Sequence: Synthetic oligonucleotide
  X-linked inhibitor of apoptosis (XIAP) siRNA
catgctccacggtgcccagttaa

SEQ ID NO: 17361 - DNA, 23 bp, Artificial Sequence
  Description of Artificial Sequence: Synthetic oligonucleotide
  X-linked inhibitor of apoptosis (XIAP) siRNA
atgctccacggtgcccagttaat

SEQ ID NO: 17362 - DNA, 23 bp, Artificial Sequence
  Description of Artificial Sequence: Synthetic oligonucleotide
  X-linked inhibitor of apoptosis (XIAP) siRNA
tgctccacggtgcccagttaatt

SEQ ID NO: 17363 - DNA, 23 bp, Artificial Sequence
  Description of Artificial Sequence: Synthetic oligonucleotide
  X-linked inhibitor of apoptosis (XIAP) siRNA
gctccacggtgcccagttaattt

SEQ ID NO: 17364 - DNA, 23 bp, Artificial Sequence
  Description of Artificial Sequence: Synthetic oligonucleotide
  X-linked inhibitor of apoptosis (XIAP) siRNA
ctccacggtgcccagttaatttt

SEQ ID NO: 17365 - DNA, 23 bp, Artificial Sequence
  Description of Artificial Sequence: Synthetic oligonucleotide
  X-linked inhibitor of apoptosis (XIAP) siRNA
tccacggtgcccagttaattttt

SEQ ID NO: 17366 - DNA, 23 bp, Artificial Sequence
  Description of Artificial Sequence: Synthetic oligonucleotide
  X-linked inhibitor of apoptosis (XIAP) siRNA
ccacggtgcccagttaatttttt

SEQ ID NO: 17367 - DNA, 23 bp, Artificial Sequence
  Description of Artificial Sequence: Synthetic oligonucleotide
  X-linked inhibitor of apoptosis (XIAP) siRNA
cacggtgcccagttaattttttt

SEQ ID NO: 17368 - DNA, 23 bp, Artificial Sequence
  Description of Artificial Sequence: Synthetic oligonucleotide
  X-linked inhibitor of apoptosis (XIAP) siRNA
acggtgcccagttaatttttttt

SEQ ID NO: 17369 - DNA, 23 bp, Artificial Sequence
  Description of Artificial Sequence: Synthetic oligonucleotide
  X-linked inhibitor of apoptosis (XIAP) siRNA
cggtgcccagttaattttttttg

SEQ ID NO: 17370 - DNA, 23 bp, Artificial Sequence
  Description of Artificial Sequence: Synthetic oligonucleotide
  X-linked inhibitor of apoptosis (XIAP) siRNA
ggtgcccagttaattttttttgt

SEQ ID NO: 17371 - DNA, 23 bp, Artificial Sequence
  Description of Artificial Sequence: Synthetic oligonucleotide
  X-linked inhibitor of apoptosis (XIAP) siRNA
gtgcccagttaattttttttgta

SEQ ID NO: 17372 - DNA, 23 bp, Artificial Sequence
  Description of Artificial Sequence: Synthetic oligonucleotide
  X-linked inhibitor of apoptosis (XIAP) siRNA
tgcccagttaattttttttgtat

SEQ ID NO: 17373 - DNA, 23 bp, Artificial Sequence
  Description of Artificial Sequence: Synthetic oligonucleotide
  X-linked inhibitor of apoptosis (XIAP) siRNA
gcccagttaattttttttgtatt

SEQ ID NO: 17374 - DNA, 23 bp, Artificial Sequence
  Description of Artificial Sequence: Synthetic oligonucleotide
  X-linked inhibitor of apoptosis (XIAP) siRNA
cccagttaattttttttgtattc

SEQ ID NO: 17375 - DNA, 23 bp, Artificial Sequence
  Description of Artificial Sequence: Synthetic oligonucleotide
  X-linked inhibitor of apoptosis (XIAP) siRNA
ccagttaattttttttgtattct

SEQ ID NO: 17376 - DNA, 23 bp, Artificial Sequence
  Description of Artificial Sequence: Synthetic oligonucleotide
  X-linked inhibitor of apoptosis (XIAP) siRNA
cagttaattttttttgtattctt

SEQ ID NO: 17377 - DNA, 23 bp, Artificial Sequence
  Description of Artificial Sequence: Synthetic oligonucleotide
  X-linked inhibitor of apoptosis (XIAP) siRNA
agttaattttttttgtattctta

SEQ ID NO: 17378 - DNA, 23 bp, Artificial Sequence
  Description of Artificial Sequence: Synthetic oligonucleotide
  X-linked inhibitor of apoptosis (XIAP) siRNA
gttaattttttttgtattcttag

SEQ ID NO: 17379 - DNA, 23 bp, Artificial Sequence
  Description of Artificial Sequence: Synthetic oligonucleotide
  X-linked inhibitor of apoptosis (XIAP) siRNA
ttaattttttttgtattcttagt

SEQ ID NO: 17380 - DNA, 23 bp, Artificial Sequence
  Description of Artificial Sequence: Synthetic oligonucleotide
  X-linked inhibitor of apoptosis (XIAP) siRNA
taattttttttgtattcttagta

SEQ ID NO: 17381 - DNA, 23 bp, Artificial Sequence
  Description of Artificial Sequence: Synthetic oligonucleotide
  X-linked inhibitor of apoptosis (XIAP) siRNA
aattttttttgtattcttagtag

SEQ ID NO: 17382 - DNA, 23 bp, Artificial Sequence
  Description of Artificial Sequence: Synthetic oligonucleotide
  X-linked inhibitor of apoptosis (XIAP) siRNA
attttttttgtattcttagtaga

SEQ ID NO: 17383 - DNA, 23 bp, Artificial Sequence
  Description of Artificial Sequence: Synthetic oligonucleotide
  X-linked inhibitor of apoptosis (XIAP) siRNA
ttttttttgtattcttagtagag

SEQ ID NO: 17384 - DNA, 23 bp, Artificial Sequence
  Description of Artificial Sequence: Synthetic oligonucleotide
  X-linked inhibitor of apoptosis (XIAP) siRNA
tttttttgtattcttagtagaga

SEQ ID NO: 17385 - DNA, 23 bp, Artificial Sequence
  Description of Artificial Sequence: Synthetic oligonucleotide
  X-linked inhibitor of apoptosis (XIAP) siRNA
ttttttgtattcttagtagagac

SEQ ID NO: 17386 - DNA, 23 bp, Artificial Sequence
  Description of Artificial Sequence: Synthetic oligonucleotide
  X-linked inhibitor of apoptosis (XIAP) siRNA
tttttgtattcttagtagagaca

SEQ ID NO: 17387 - DNA, 23 bp, Artificial Sequence
  Description of Artificial Sequence: Synthetic oligonucleotide
  X-linked inhibitor of apoptosis (XIAP) siRNA
ttttgtattcttagtagagacag

SEQ ID NO: 17388 - DNA, 23 bp, Artificial Sequence
  Description of Artificial Sequence: Synthetic oligonucleotide
  X-linked inhibitor of apoptosis (XIAP) siRNA
tttgtattcttagtagagacagg

SEQ ID NO: 17389 - DNA, 23 bp, Artificial Sequence
  Description of Artificial Sequence: Synthetic oligonucleotide
  X-linked inhibitor of apoptosis (XIAP) siRNA
ttgtattcttagtagagacaggg

SEQ ID NO: 17390 - DNA, 23 bp, Artificial Sequence
  Description of Artificial Sequence: Synthetic oligonucleotide
  X-linked inhibitor of apoptosis (XIAP) siRNA
tgtattcttagtagagacagggt

SEQ ID NO: 17391 - DNA, 23 bp, Artificial Sequence
  Description of Artificial Sequence: Synthetic oligonucleotide
  X-linked inhibitor of apoptosis (XIAP) siRNA
gtattcttagtagagacagggtt

SEQ ID NO: 17392 - DNA, 23 bp, Artificial Sequence
  Description of Artificial Sequence: Synthetic oligonucleotide
  X-linked inhibitor of apoptosis (XIAP) siRNA
tattcttagtagagacagggttt

SEQ ID NO: 17393 - DNA, 23 bp, Artificial Sequence
  Description of Artificial Sequence: Synthetic oligonucleotide
  X-linked inhibitor of apoptosis (XIAP) siRNA
attcttagtagagacagggtttc

SEQ ID NO: 17394 - DNA, 23 bp, Artificial Sequence
  Description of Artificial Sequence: Synthetic oligonucleotide
  X-linked inhibitor of apoptosis (XIAP) siRNA
ttcttagtagagacagggtttca

SEQ ID NO: 17395 - DNA, 23 bp, Artificial Sequence
  Description of Artificial Sequence: Synthetic oligonucleotide
  X-linked inhibitor of apoptosis (XIAP) siRNA
tcttagtagagacagggtttcac

SEQ ID NO: 17396 - DNA, 23 bp, Artificial Sequence
  Description of Artificial Sequence: Synthetic oligonucleotide
  X-linked inhibitor of apoptosis (XIAP) siRNA
cttagtagagacagggtttcacc

SEQ ID NO: 17397 - DNA, 23 bp, Artificial Sequence
  Description of Artificial Sequence: Synthetic oligonucleotide
  X-linked inhibitor of apoptosis (XIAP) siRNA
ttagtagagacagggtttcacca

SEQ ID NO: 17398 - DNA, 23 bp, Artificial Sequence
  Description of Artificial Sequence: Synthetic oligonucleotide
  X-linked inhibitor of apoptosis (XIAP) siRNA
tagtagagacagggtttcaccat

SEQ ID NO: 17399 - DNA, 23 bp, Artificial Sequence
  Description of Artificial Sequence: Synthetic oligonucleotide
  X-linked inhibitor of apoptosis (XIAP) siRNA
agtagagacagggtttcaccatg

SEQ ID NO: 17400 - DNA, 23 bp, Artificial Sequence
  Description of Artificial Sequence: Synthetic oligonucleotide
  X-linked inhibitor of apoptosis (XIAP) siRNA
gtagagacagggtttcaccatgt

SEQ ID NO: 17401 - DNA, 23 bp, Artificial Sequence
  Description of Artificial Sequence: Synthetic oligonucleotide
  X-linked inhibitor of apoptosis (XIAP) siRNA
tagagacagggtttcaccatgtt

SEQ ID NO: 17402 - DNA, 23 bp, Artificial Sequence
  Description of Artificial Sequence: Synthetic oligonucleotide
  X-linked inhibitor of apoptosis (XIAP) siRNA
agagacagggtttcaccatgttg

SEQ ID NO: 17403 - DNA, 23 bp, Artificial Sequence
  Description of Artificial Sequence: Synthetic oligonucleotide
  X-linked inhibitor of apoptosis (XIAP) siRNA
gagacagggtttcaccatgttgg

SEQ ID NO: 17404 - DNA, 23 bp, Artificial Sequence
  Description of Artificial Sequence: Synthetic oligonucleotide
  X-linked inhibitor of apoptosis (XIAP) siRNA
agacagggtttcaccatgttggc

SEQ ID NO: 17405 - DNA, 23 bp, Artificial Sequence
  Description of Artificial Sequence: Synthetic oligonucleotide
  X-linked inhibitor of apoptosis (XIAP) siRNA
gacagggtttcaccatgttggcc

SEQ ID NO: 17406 - DNA, 23 bp, Artificial Sequence
  Description of Artificial Sequence: Synthetic oligonucleotide
  X-linked inhibitor of apoptosis (XIAP) siRNA
acagggtttcaccatgttggcca

SEQ ID NO: 17407 - DNA, 23 bp, Artificial Sequence
  Description of Artificial Sequence: Synthetic oligonucleotide
  X-linked inhibitor of apoptosis (XIAP) siRNA
cagggtttcaccatgttggccag

SEQ ID NO: 17408 - DNA, 23 bp, Artificial Sequence
  Description of Artificial Sequence: Synthetic oligonucleotide
  X-linked inhibitor of apoptosis (XIAP) siRNA
agggtttcaccatgttggccagg

SEQ ID NO: 17409 - DNA, 23 bp, Artificial Sequence
  Description of Artificial Sequence: Synthetic oligonucleotide
  X-linked inhibitor of apoptosis (XIAP) siRNA
gggtttcaccatgttggccaggc

SEQ ID NO: 17410 - DNA, 23 bp, Artificial Sequence
  Description of Artificial Sequence: Synthetic oligonucleotide
  X-linked inhibitor of apoptosis (XIAP) siRNA
ggtttcaccatgttggccaggct

SEQ ID NO: 17411 - DNA, 23 bp, Artificial Sequence
  Description of Artificial Sequence: Synthetic oligonucleotide
  X-linked inhibitor of apoptosis (XIAP) siRNA
gtttcaccatgttggccaggcta

SEQ ID NO: 17412 - DNA, 23 bp, Artificial Sequence
  Description of Artificial Sequence: Synthetic oligonucleotide
  X-linked inhibitor of apoptosis (XIAP) siRNA
tttcaccatgttggccaggctag

SEQ ID NO: 17413 - DNA, 23 bp, Artificial Sequence
  Description of Artificial Sequence: Synthetic oligonucleotide
  X-linked inhibitor of apoptosis (XIAP) siRNA
ttcaccatgttggccaggctagt

SEQ ID NO: 17414 - DNA, 23 bp, Artificial Sequence
  Description of Artificial Sequence: Synthetic oligonucleotide
  X-linked inhibitor of apoptosis (XIAP) siRNA
tcaccatgttggccaggctagtc

SEQ ID NO: 17415 - DNA, 23 bp, Artificial Sequence
  Description of Artificial Sequence: Synthetic oligonucleotide
  X-linked inhibitor of apoptosis (XIAP) siRNA
caccatgttggccaggctagtct

SEQ ID NO: 17416 - DNA, 23 bp, Artificial Sequence
  Description of Artificial Sequence: Synthetic oligonucleotide
  X-linked inhibitor of apoptosis (XIAP) siRNA
accatgttggccaggctagtctt

SEQ ID NO: 17417 - DNA, 23 bp, Artificial Sequence
  Description of Artificial Sequence: Synthetic oligonucleotide
  X-linked inhibitor of apoptosis (XIAP) siRNA
ccatgttggccaggctagtcttg

SEQ ID NO: 17418 - DNA, 23 bp, Artificial Sequence
  Description of Artificial Sequence: Synthetic oligonucleotide
  X-linked inhibitor of apoptosis (XIAP) siRNA
catgttggccaggctagtcttga

SEQ ID NO: 17419 - DNA, 23 bp, Artificial Sequence
  Description of Artificial Sequence: Synthetic oligonucleotide
  X-linked inhibitor of apoptosis (XIAP) siRNA
atgttggccaggctagtcttgaa

SEQ ID NO: 17420 - DNA, 23 bp, Artificial Sequence
  Description of Artificial Sequence: Synthetic oligonucleotide
  X-linked inhibitor of apoptosis (XIAP) siRNA
tgttggccaggctagtcttgaat

SEQ ID NO: 17421 - DNA, 23 bp, Artificial Sequence
  Description of Artificial Sequence: Synthetic oligonucleotide
  X-linked inhibitor of apoptosis (XIAP) siRNA
gttggccaggctagtcttgaatt

SEQ ID NO: 17422 - DNA, 23 bp, Artificial Sequence
  Description of Artificial Sequence: Synthetic oligonucleotide
  X-linked inhibitor of apoptosis (XIAP) siRNA
ttggccaggctagtcttgaattt

SEQ ID NO: 17423 - DNA, 23 bp, Artificial Sequence
  Description of Artificial Sequence: Synthetic oligonucleotide
  X-linked inhibitor of apoptosis (XIAP) siRNA
tggccaggctagtcttgaatttc

SEQ ID NO: 17424 - DNA, 23 bp, Artificial Sequence
  Description of Artificial Sequence: Synthetic oligonucleotide
  X-linked inhibitor of apoptosis (XIAP) siRNA
ggccaggctagtcttgaatttct

SEQ ID NO: 17425 - DNA, 23 bp, Artificial Sequence
  Description of Artificial Sequence: Synthetic oligonucleotide
  X-linked inhibitor of apoptosis (XIAP) siRNA
gccaggctagtcttgaatttctg

SEQ ID NO: 17426 - DNA, 23 bp, Artificial Sequence
  Description of Artificial Sequence: Synthetic oligonucleotide
  X-linked inhibitor of apoptosis (XIAP) siRNA
ccaggctagtcttgaatttctga

SEQ ID NO: 17427 - DNA, 23 bp, Artificial Sequence
  Description of Artificial Sequence: Synthetic oligonucleotide
  X-linked inhibitor of apoptosis (XIAP) siRNA
caggctagtcttgaatttctgac

SEQ ID NO: 17428 - DNA, 23 bp, Artificial Sequence
  Description of Artificial Sequence: Synthetic oligonucleotide
  X-linked inhibitor of apoptosis (XIAP) siRNA
aggctagtcttgaatttctgacc

SEQ ID NO: 17429 - DNA, 23 bp, Artificial Sequence
  Description of Artificial Sequence: Synthetic oligonucleotide
  X-linked inhibitor of apoptosis (XIAP) siRNA
ggctagtcttgaatttctgacct

SEQ ID NO: 17430 - DNA, 23 bp, Artificial Sequence
  Description of Artificial Sequence: Synthetic oligonucleotide
  X-linked inhibitor of apoptosis (XIAP) siRNA
gctagtcttgaatttctgacctc

SEQ ID NO: 17431 - DNA, 23 bp, Artificial Sequence
  Description of Artificial Sequence: Synthetic oligonucleotide
  X-linked inhibitor of apoptosis (XIAP) siRNA
ctagtcttgaatttctgacctca

SEQ ID NO: 17432 - DNA, 23 bp, Artificial Sequence
  Description of Artificial Sequence: Synthetic oligonucleotide
  X-linked inhibitor of apoptosis (XIAP) siRNA
tagtcttgaatttctgacctcaa

SEQ ID NO: 17433 - DNA, 23 bp, Artificial Sequence
  Description of Artificial Sequence: Synthetic oligonucleotide
  X-linked inhibitor of apoptosis (XIAP) siRNA
agtcttgaatttctgacctcaag

SEQ ID NO: 17434 - DNA, 23 bp, Artificial Sequence
  Description of Artificial Sequence: Synthetic oligonucleotide
  X-linked inhibitor of apoptosis (XIAP) siRNA
gtcttgaatttctgacctcaagt

SEQ ID NO: 17435 - DNA, 23 bp, Artificial Sequence
  Description of Artificial Sequence: Synthetic oligonucleotide
  X-linked inhibitor of apoptosis (XIAP) siRNA
tcttgaatttctgacctcaagtg

SEQ ID NO: 17436 - DNA, 23 bp, Artificial Sequence
  Description of Artificial Sequence: Synthetic oligonucleotide
  X-linked inhibitor of apoptosis (XIAP) siRNA
cttgaatttctgacctcaagtga

SEQ ID NO: 17437 - DNA, 23 bp, Artificial Sequence
  Description of Artificial Sequence: Synthetic oligonucleotide
  X-linked inhibitor of apoptosis (XIAP) siRNA
ttgaatttctgacctcaagtgat

SEQ ID NO: 17438 - DNA, 23 bp, Artificial Sequence
  Description of Artificial Sequence: Synthetic oligonucleotide
  X-linked inhibitor of apoptosis (XIAP) siRNA
tgaatttctgacctcaagtgatt

SEQ ID NO: 17439 - DNA, 23 bp, Artificial Sequence
  Description of Artificial Sequence: Synthetic oligonucleotide
  X-linked inhibitor of apoptosis (XIAP) siRNA
gaatttctgacctcaagtgattc

SEQ ID NO: 17440 - DNA, 23 bp, Artificial Sequence
  Description of Artificial Sequence: Synthetic oligonucleotide
  X-linked inhibitor of apoptosis (XIAP) siRNA
aatttctgacctcaagtgattca

SEQ ID NO: 17441 - DNA, 23 bp, Artificial Sequence
  Description of Artificial Sequence: Synthetic oligonucleotide
  X-linked inhibitor of apoptosis (XIAP) siRNA
atttctgacctcaagtgattcat

SEQ ID NO: 17442 - DNA, 23 bp, Artificial Sequence
  Description of Artificial Sequence: Synthetic oligonucleotide
  X-linked inhibitor of apoptosis (XIAP) siRNA
tttctgacctcaagtgattcatc

SEQ ID NO: 17443 - DNA, 23 bp, Artificial Sequence
  Description of Artificial Sequence: Synthetic oligonucleotide
  X-linked inhibitor of apoptosis (XIAP) siRNA
ttctgacctcaagtgattcatct

SEQ ID NO: 17444 - DNA, 23 bp, Artificial Sequence
  Description of Artificial Sequence: Synthetic oligonucleotide
  X-linked inhibitor of apoptosis (XIAP) siRNA
tctgacctcaagtgattcatctc

SEQ ID NO: 17445 - DNA, 23 bp, Artificial Sequence
  Description of Artificial Sequence: Synthetic oligonucleotide
  X-linked inhibitor of apoptosis (XIAP) siRNA
ctgacctcaagtgattcatctcc

SEQ ID NO: 17446 - DNA, 23 bp, Artificial Sequence
  Description of Artificial Sequence: Synthetic oligonucleotide
  X-linked inhibitor of apoptosis (XIAP) siRNA
tgacctcaagtgattcatctccc

SEQ ID NO: 17447 - DNA, 23 bp, Artificial Sequence
  Description of Artificial Sequence: Synthetic oligonucleotide
  X-linked inhibitor of apoptosis (XIAP) siRNA
gacctcaagtgattcatctccca

SEQ ID NO: 17448 - DNA, 23 bp, Artificial Sequence
  Description of Artificial Sequence: Synthetic oligonucleotide
  X-linked inhibitor of apoptosis (XIAP) siRNA
acctcaagtgattcatctcccaa

SEQ ID NO: 17449 - DNA, 23 bp, Artificial Sequence
  Description of Artificial Sequence: Synthetic oligonucleotide
  X-linked inhibitor of apoptosis (XIAP) siRNA
cctcaagtgattcatctcccaaa

SEQ ID NO: 17450 - DNA, 23 bp, Artificial Sequence
  Description of Artificial Sequence: Synthetic oligonucleotide
  X-linked inhibitor of apoptosis (XIAP) siRNA
ctcaagtgattcatctcccaaag

SEQ ID NO: 17451 - DNA, 23 bp, Artificial Sequence
  Description of Artificial Sequence: Synthetic oligonucleotide
  X-linked inhibitor of apoptosis (XIAP) siRNA
tcaagtgattcatctcccaaagt

SEQ ID NO: 17452 - DNA, 23 bp, Artificial Sequence
  Description of Artificial Sequence: Synthetic oligonucleotide
  X-linked inhibitor of apoptosis (XIAP) siRNA
caagtgattcatctcccaaagtg

SEQ ID NO: 17453 - DNA, 23 bp, Artificial Sequence
  Description of Artificial Sequence: Synthetic oligonucleotide
  X-linked inhibitor of apoptosis (XIAP) siRNA
aagtgattcatctcccaaagtgc

SEQ ID NO: 17454 - DNA, 23 bp, Artificial Sequence
  Description of Artificial Sequence: Synthetic oligonucleotide
  X-linked inhibitor of apoptosis (XIAP) siRNA
agtgattcatctcccaaagtgct

SEQ ID NO: 17455 - DNA, 23 bp, Artificial Sequence
  Description of Artificial Sequence: Synthetic oligonucleotide
  X-linked inhibitor of apoptosis (XIAP) siRNA
gtgattcatctcccaaagtgctg

SEQ ID NO: 17456 - DNA, 23 bp, Artificial Sequence
  Description of Artificial Sequence: Synthetic oligonucleotide
  X-linked inhibitor of apoptosis (XIAP) siRNA
tgattcatctcccaaagtgctgg

SEQ ID NO: 17457 - DNA, 23 bp, Artificial Sequence
  Description of Artificial Sequence: Synthetic oligonucleotide
  X-linked inhibitor of apoptosis (XIAP) siRNA
gattcatctcccaaagtgctggg

SEQ ID NO: 17458 - DNA, 23 bp, Artificial Sequence
  Description of Artificial Sequence: Synthetic oligonucleotide
  X-linked inhibitor of apoptosis (XIAP) siRNA
attcatctcccaaagtgctggga

SEQ ID NO: 17459 - DNA, 23 bp, Artificial Sequence
  Description of Artificial Sequence: Synthetic oligonucleotide
  X-linked inhibitor of apoptosis (XIAP) siRNA
ttcatctcccaaagtgctgggat

SEQ ID NO: 17460 - DNA, 23 bp, Artificial Sequence
  Description of Artificial Sequence: Synthetic oligonucleotide
  X-linked inhibitor of apoptosis (XIAP) siRNA
tcatctcccaaagtgctgggatt

SEQ ID NO: 17461 - DNA, 23 bp, Artificial Sequence
  Description of Artificial Sequence: Synthetic oligonucleotide
  X-linked inhibitor of apoptosis (XIAP) siRNA
catctcccaaagtgctgggatta

SEQ ID NO: 17462 - DNA, 23 bp, Artificial Sequence
  Description of Artificial Sequence: Synthetic oligonucleotide
  X-linked inhibitor of apoptosis (XIAP) siRNA
atctcccaaagtgctgggattac

SEQ ID NO: 17463 - DNA, 23 bp, Artificial Sequence
  Description of Artificial Sequence: Synthetic oligonucleotide
  X-linked inhibitor of apoptosis (XIAP) siRNA
tctcccaaagtgctgggattaca

SEQ ID NO: 17464 - DNA, 23 bp, Artificial Sequence
  Description of Artificial Sequence: Synthetic oligonucleotide
  X-linked inhibitor of apoptosis (XIAP) siRNA
ctcccaaagtgctgggattacag

SEQ ID NO: 17465 - DNA, 23 bp, Artificial Sequence
  Description of Artificial Sequence: Synthetic oligonucleotide
  X-linked inhibitor of apoptosis (XIAP) siRNA
tcccaaagtgctgggattacagg

SEQ ID NO: 17466 - DNA, 23 bp, Artificial Sequence
  Description of Artificial Sequence: Synthetic oligonucleotide
  X-linked inhibitor of apoptosis (XIAP) siRNA
cccaaagtgctgggattacaggc

SEQ ID NO: 17467 - DNA, 23 bp, Artificial Sequence
  Description of Artificial Sequence: Synthetic oligonucleotide
  X-linked inhibitor of apoptosis (XIAP) siRNA
ccaaagtgctgggattacaggcg

SEQ ID NO: 17468 - DNA, 23 bp, Artificial Sequence
  Description of Artificial Sequence: Synthetic oligonucleotide
  X-linked inhibitor of apoptosis (XIAP) siRNA
caaagtgctgggattacaggcgt

SEQ ID NO: 17469 - DNA, 23 bp, Artificial Sequence
  Description of Artificial Sequence: Synthetic oligonucleotide
  X-linked inhibitor of apoptosis (XIAP) siRNA
aaagtgctgggattacaggcgtg

SEQ ID NO: 17470 - DNA, 23 bp, Artificial Sequence
  Description of Artificial Sequence: Synthetic oligonucleotide
  X-linked inhibitor of apoptosis (XIAP) siRNA
aagtgctgggattacaggcgtga

SEQ ID NO: 17471 - DNA, 23 bp, Artificial Sequence
  Description of Artificial Sequence: Synthetic oligonucleotide
  X-linked inhibitor of apoptosis (XIAP) siRNA
agtgctgggattacaggcgtgag

SEQ ID NO: 17472 - DNA, 23 bp, Artificial Sequence
  Description of Artificial Sequence: Synthetic oligonucleotide
  X-linked inhibitor of apoptosis (XIAP) siRNA
gtgctgggattacaggcgtgagc

SEQ ID NO: 17473 - DNA, 23 bp, Artificial Sequence
  Description of Artificial Sequence: Synthetic oligonucleotide
  X-linked inhibitor of apoptosis (XIAP) siRNA
tgctgggattacaggcgtgagcc

SEQ ID NO: 17474 - DNA, 23 bp, Artificial Sequence
  Description of Artificial Sequence: Synthetic oligonucleotide
  X-linked inhibitor of apoptosis (XIAP) siRNA
gctgggattacaggcgtgagcca

SEQ ID NO: 17475 - DNA, 23 bp, Artificial Sequence
  Description of Artificial Sequence: Synthetic oligonucleotide
  X-linked inhibitor of apoptosis (XIAP) siRNA
ctgggattacaggcgtgagccac

SEQ ID NO: 17476 - DNA, 23 bp, Artificial Sequence
  Description of Artificial Sequence: Synthetic oligonucleotide
  X-linked inhibitor of apoptosis (XIAP) siRNA
tgggattacaggcgtgagccacc

SEQ ID NO: 17477 - DNA, 23 bp, Artificial Sequence
  Description of Artificial Sequence: Synthetic oligonucleotide
  X-linked inhibitor of apoptosis (XIAP) siRNA
gggattacaggcgtgagccacca

SEQ ID NO: 17478 - DNA, 23 bp, Artificial Sequence
  Description of Artificial Sequence: Synthetic oligonucleotide
  X-linked inhibitor of apoptosis (XIAP) siRNA
ggattacaggcgtgagccaccac

SEQ ID NO: 17479 - DNA, 23 bp, Artificial Sequence
  Description of Artificial Sequence: Synthetic oligonucleotide
  X-linked inhibitor of apoptosis (XIAP) siRNA
gattacaggcgtgagccaccacg

SEQ ID NO: 17480 - DNA, 23 bp, Artificial Sequence
  Description of Artificial Sequence: Synthetic oligonucleotide
  X-linked inhibitor of apoptosis (XIAP) siRNA
attacaggcgtgagccaccacgg

SEQ ID NO: 17481 - DNA, 23 bp, Artificial Sequence
  Description of Artificial Sequence: Synthetic oligonucleotide
  X-linked inhibitor of apoptosis (XIAP) siRNA
ttacaggcgtgagccaccacggc

SEQ ID NO: 17482 - DNA, 23 bp, Artificial Sequence
  Description of Artificial Sequence: Synthetic oligonucleotide
  X-linked inhibitor of apoptosis (XIAP) siRNA
tacaggcgtgagccaccacggcc

SEQ ID NO: 17483 - DNA, 23 bp, Artificial Sequence
  Description of Artificial Sequence: Synthetic oligonucleotide
  X-linked inhibitor of apoptosis (XIAP) siRNA
acaggcgtgagccaccacggccg

SEQ ID NO: 17484 - DNA, 23 bp, Artificial Sequence
  Description of Artificial Sequence: Synthetic oligonucleotide
  X-linked inhibitor of apoptosis (XIAP) siRNA
caggcgtgagccaccacggccgg

SEQ ID NO: 17485 - DNA, 23 bp, Artificial Sequence
  Description of Artificial Sequence: Synthetic oligonucleotide
  X-linked inhibitor of apoptosis (XIAP) siRNA
aggcgtgagccaccacggccggc

SEQ ID NO: 17486 - DNA, 23 bp, Artificial Sequence
  Description of Artificial Sequence: Synthetic oligonucleotide
  X-linked inhibitor of apoptosis (XIAP) siRNA
ggcgtgagccaccacggccggct

SEQ ID NO: 17487 - DNA, 23 bp, Artificial Sequence
  Description of Artificial Sequence: Synthetic oligonucleotide
  X-linked inhibitor of apoptosis (XIAP) siRNA
gcgtgagccaccacggccggcta

SEQ ID NO: 17488 - DNA, 23 bp, Artificial Sequence
  Description of Artificial Sequence: Synthetic oligonucleotide
  X-linked inhibitor of apoptosis (XIAP) siRNA
cgtgagccaccacggccggctaa

SEQ ID NO: 17489 - DNA, 23 bp, Artificial Sequence
  Description of Artificial Sequence: Synthetic oligonucleotide
  X-linked inhibitor of apoptosis (XIAP) siRNA
gtgagccaccacggccggctaat

SEQ ID NO: 17490 - DNA, 23 bp, Artificial Sequence
  Description of Artificial Sequence: Synthetic oligonucleotide
  X-linked inhibitor of apoptosis (XIAP) siRNA
tgagccaccacggccggctaatt

SEQ ID NO: 17491 - DNA, 23 bp, Artificial Sequence
  Description of Artificial Sequence: Synthetic oligonucleotide
  X-linked inhibitor of apoptosis (XIAP) siRNA
gagccaccacggccggctaattt

SEQ ID NO: 17492 - DNA, 23 bp, Artificial Sequence
  Description of Artificial Sequence: Synthetic oligonucleotide
  X-linked inhibitor of apoptosis (XIAP) siRNA
agccaccacggccggctaatttt

SEQ ID NO: 17493 - DNA, 23 bp, Artificial Sequence
  Description of Artificial Sequence: Synthetic oligonucleotide
  X-linked inhibitor of apoptosis (XIAP) siRNA
gccaccacggccggctaattttt

SEQ ID NO: 17494 - DNA, 23 bp, Artificial Sequence
  Description of Artificial Sequence: Synthetic oligonucleotide
  X-linked inhibitor of apoptosis (XIAP) siRNA
ccaccacggccggctaatttttg

SEQ ID NO: 17495 - DNA, 23 bp, Artificial Sequence
  Description of Artificial Sequence: Synthetic oligonucleotide
  X-linked inhibitor of apoptosis (XIAP) siRNA
caccacggccggctaatttttgt

SEQ ID NO: 17496 - DNA, 23 bp, Artificial Sequence
  Description of Artificial Sequence: Synthetic oligonucleotide
  X-linked inhibitor of apoptosis (XIAP) siRNA
accacggccggctaatttttgta

SEQ ID NO: 17497 - DNA, 23 bp, Artificial Sequence
  Description of Artificial Sequence: Synthetic oligonucleotide
  X-linked inhibitor of apoptosis (XIAP) siRNA
ccacggccggctaatttttgtat

SEQ ID NO: 17498 - DNA, 23 bp, Artificial Sequence
  Description of Artificial Sequence: Synthetic oligonucleotide
  X-linked inhibitor of apoptosis (XIAP) siRNA
cacggccggctaatttttgtatt

SEQ ID NO: 17499 - DNA, 23 bp, Artificial Sequence
  Description of Artificial Sequence: Synthetic oligonucleotide
  X-linked inhibitor of apoptosis (XIAP) siRNA
acggccggctaatttttgtattt

SEQ ID NO: 17500 - DNA, 23 bp, Artificial Sequence
  Description of Artificial Sequence: Synthetic oligonucleotide
  X-linked inhibitor of apoptosis (XIAP) siRNA
cggccggctaatttttgtatttt

SEQ ID NO: 17501 - DNA, 23 bp, Artificial Sequence
  Description of Artificial Sequence: Synthetic oligonucleotide
  X-linked inhibitor of apoptosis (XIAP) siRNA
ggccggctaatttttgtattttt

SEQ ID NO: 17502 - DNA, 23 bp, Artificial Sequence
  Description of Artificial Sequence: Synthetic oligonucleotide
  X-linked inhibitor of apoptosis (XIAP) siRNA
gccggctaatttttgtatttttt

SEQ ID NO: 17503 - DNA, 23 bp, Artificial Sequence
  Description of Artificial Sequence: Synthetic oligonucleotide
  X-linked inhibitor of apoptosis (XIAP) siRNA
ccggctaatttttgtatttttta

SEQ ID NO: 17504 - DNA, 23 bp, Artificial Sequence
  Description of Artificial Sequence: Synthetic oligonucleotide
  X-linked inhibitor of apoptosis (XIAP) siRNA
cggctaatttttgtattttttag

SEQ ID NO: 17505 - DNA, 23 bp, Artificial Sequence
  Description of Artificial Sequence: Synthetic oligonucleotide
  X-linked inhibitor of apoptosis (XIAP) siRNA
ggctaatttttgtattttttagt

SEQ ID NO: 17506 - DNA, 23 bp, Artificial Sequence
  Description of Artificial Sequence: Synthetic oligonucleotide
  X-linked inhibitor of apoptosis (XIAP) siRNA
gctaatttttgtattttttagta

SEQ ID NO: 17507 - DNA, 23 bp, Artificial Sequence
  Description of Artificial Sequence: Synthetic oligonucleotide
  X-linked inhibitor of apoptosis (XIAP) siRNA
ctaatttttgtattttttagtag

SEQ ID NO: 17508 - DNA, 23 bp, Artificial Sequence
  Description of Artificial Sequence: Synthetic oligonucleotide
  X-linked inhibitor of apoptosis (XIAP) siRNA
taatttttgtattttttagtagt

SEQ ID NO: 17509 - DNA, 23 bp, Artificial Sequence
  Description of Artificial Sequence: Synthetic oligonucleotide
  X-linked inhibitor of apoptosis (XIAP) siRNA
aatttttgtattttttagtagtg

SEQ ID NO: 17510 - DNA, 23 bp, Artificial Sequence
  Description of Artificial Sequence: Synthetic oligonucleotide
  X-linked inhibitor of apoptosis (XIAP) siRNA
atttttgtattttttagtagtga

SEQ ID NO: 17511 - DNA, 23 bp, Artificial Sequence
  Description of Artificial Sequence: Synthetic oligonucleotide
  X-linked inhibitor of apoptosis (XIAP) siRNA
tttttgtattttttagtagtgac

SEQ ID NO: 17512 - DNA, 23 bp, Artificial Sequence
  Description of Artificial Sequence: Synthetic oligonucleotide
  X-linked inhibitor of apoptosis (XIAP) siRNA
ttttgtattttttagtagtgact

SEQ ID NO: 17513 - DNA, 23 bp, Artificial Sequence
  Description of Artificial Sequence: Synthetic oligonucleotide
  X-linked inhibitor of apoptosis (XIAP) siRNA
tttgtattttttagtagtgactg

SEQ ID NO: 17514 - DNA, 23 bp, Artificial Sequence
  Description of Artificial Sequence: Synthetic oligonucleotide
  X-linked inhibitor of apoptosis (XIAP) siRNA
ttgtattttttagtagtgactgg

SEQ ID NO: 17515 - DNA, 23 bp, Artificial Sequence
  Description of Artificial Sequence: Synthetic oligonucleotide
  X-linked inhibitor of apoptosis (XIAP) siRNA
tgtattttttagtagtgactggt

SEQ ID NO: 17516 - DNA, 23 bp, Artificial Sequence
  Description of Artificial Sequence: Synthetic oligonucleotide
  X-linked inhibitor of apoptosis (XIAP) siRNA
gtattttttagtagtgactggtt

SEQ ID NO: 17517 - DNA, 23 bp, Artificial Sequence
  Description of Artificial Sequence: Synthetic oligonucleotide
  X-linked inhibitor of apoptosis (XIAP) siRNA
tattttttagtagtgactggttt

SEQ ID NO: 17518 - DNA, 23 bp, Artificial Sequence
  Description of Artificial Sequence: Synthetic oligonucleotide
  X-linked inhibitor of apoptosis (XIAP) siRNA
attttttagtagtgactggtttc

SEQ ID NO: 17519 - DNA, 23 bp, Artificial Sequence
  Description of Artificial Sequence: Synthetic oligonucleotide
  X-linked inhibitor of apoptosis (XIAP) siRNA
ttttttagtagtgactggtttcg

SEQ ID NO: 17520 - DNA, 23 bp, Artificial Sequence
  Description of Artificial Sequence: Synthetic oligonucleotide
  X-linked inhibitor of apoptosis (XIAP) siRNA
tttttagtagtgactggtttcgc

SEQ ID NO: 17521 - DNA, 23 bp, Artificial Sequence
  Description of Artificial Sequence: Synthetic oligonucleotide
  X-linked inhibitor of apoptosis (XIAP) siRNA
ttttagtagtgactggtttcgcg

SEQ ID NO: 17522 - DNA, 23 bp, Artificial Sequence
  Description of Artificial Sequence: Synthetic oligonucleotide
  X-linked inhibitor of apoptosis (XIAP) siRNA
tttagtagtgactggtttcgcgg

SEQ ID NO: 17523 - DNA, 23 bp, Artificial Sequence
  Description of Artificial Sequence: Synthetic oligonucleotide
  X-linked inhibitor of apoptosis (XIAP) siRNA
ttagtagtgactggtttcgcggt

SEQ ID NO: 17524 - DNA, 23 bp, Artificial Sequence
  Description of Artificial Sequence: Synthetic oligonucleotide
  X-linked inhibitor of apoptosis (XIAP) siRNA
tagtagtgactggtttcgcggtg

SEQ ID NO: 17525 - DNA, 23 bp, Artificial Sequence
  Description of Artificial Sequence: Synthetic oligonucleotide
  X-linked inhibitor of apoptosis (XIAP) siRNA
agtagtgactggtttcgcggtgt

SEQ ID NO: 17526 - DNA, 23 bp, Artificial Sequence
  Description of Artificial Sequence: Synthetic oligonucleotide
  X-linked inhibitor of apoptosis (XIAP) siRNA
gtagtgactggtttcgcggtgtt

SEQ ID NO: 17527 - DNA, 23 bp, Artificial Sequence
  Description of Artificial Sequence: Synthetic oligonucleotide
  X-linked inhibitor of apoptosis (XIAP) siRNA
tagtgactggtttcgcggtgttg

SEQ ID NO: 17528 - DNA, 23 bp, Artificial Sequence
  Description of Artificial Sequence: Synthetic oligonucleotide
  X-linked inhibitor of apoptosis (XIAP) siRNA
agtgactggtttcgcggtgttga

SEQ ID NO: 17529 - DNA, 23 bp, Artificial Sequence
  Description of Artificial Sequence: Synthetic oligonucleotide
  X-linked inhibitor of apoptosis (XIAP) siRNA
gtgactggtttcgcggtgttgac

SEQ ID NO: 17530 - DNA, 23 bp, Artificial Sequence
  Description of Artificial Sequence: Synthetic oligonucleotide
  X-linked inhibitor of apoptosis (XIAP) siRNA
tgactggtttcgcggtgttgacc

SEQ ID NO: 17531 - DNA, 23 bp, Artificial Sequence
  Description of Artificial Sequence: Synthetic oligonucleotide
  X-linked inhibitor of apoptosis (XIAP) siRNA
gactggtttcgcggtgttgacca

SEQ ID NO: 17532 - DNA, 23 bp, Artificial Sequence
  Description of Artificial Sequence: Synthetic oligonucleotide
  X-linked inhibitor of apoptosis (XIAP) siRNA
actggtttcgcggtgttgaccag

SEQ ID NO: 17533 - DNA, 23 bp, Artificial Sequence
  Description of Artificial Sequence: Synthetic oligonucleotide
  X-linked inhibitor of apoptosis (XIAP) siRNA
ctggtttcgcggtgttgaccagg

SEQ ID NO: 17534 - DNA, 23 bp, Artificial Sequence
  Description of Artificial Sequence: Synthetic oligonucleotide
  X-linked inhibitor of apoptosis (XIAP) siRNA
tggtttcgcggtgttgaccaggc

SEQ ID NO: 17535 - DNA, 23 bp, Artificial Sequence
  Description of Artificial Sequence: Synthetic oligonucleotide
  X-linked inhibitor of apoptosis (XIAP) siRNA
ggtttcgcggtgttgaccaggct

SEQ ID NO: 17536 - DNA, 23 bp, Artificial Sequence
  Description of Artificial Sequence: Synthetic oligonucleotide
  X-linked inhibitor of apoptosis (XIAP) siRNA
gtttcgcggtgttgaccaggctg

SEQ ID NO: 17537 - DNA, 23 bp, Artificial Sequence
  Description of Artificial Sequence: Synthetic oligonucleotide
  X-linked inhibitor of apoptosis (XIAP) siRNA
tttcgcggtgttgaccaggctgg

SEQ ID NO: 17538 - DNA, 23 bp, Artificial Sequence
  Description of Artificial Sequence: Synthetic oligonucleotide
  X-linked inhibitor of apoptosis (XIAP) siRNA
ttcgcggtgttgaccaggctggt

SEQ ID NO: 17539 - DNA, 23 bp, Artificial Sequence
  Description of Artificial Sequence: Synthetic oligonucleotide
  X-linked inhibitor of apoptosis (XIAP) siRNA
tcgcggtgttgaccaggctggtc

SEQ ID NO: 17540 - DNA, 23 bp, Artificial Sequence
  Description of Artificial Sequence: Synthetic oligonucleotide
  X-linked inhibitor of apoptosis (XIAP) siRNA
cgcggtgttgaccaggctggtct

SEQ ID NO: 17541 - DNA, 23 bp, Artificial Sequence
  Description of Artificial Sequence: Synthetic oligonucleotide
  X-linked inhibitor of apoptosis (XIAP) siRNA
gcggtgttgaccaggctggtctc

SEQ ID NO: 17542 - DNA, 23 bp, Artificial Sequence
  Description of Artificial Sequence: Synthetic oligonucleotide
  X-linked inhibitor of apoptosis (XIAP) siRNA
cggtgttgaccaggctggtctcg

SEQ ID NO: 17543 - DNA, 23 bp, Artificial Sequence
  Description of Artificial Sequence: Synthetic oligonucleotide
  X-linked inhibitor of apoptosis (XIAP) siRNA
ggtgttgaccaggctggtctcga

SEQ ID NO: 17544 - DNA, 23 bp, Artificial Sequence
  Description of Artificial Sequence: Synthetic oligonucleotide
  X-linked inhibitor of apoptosis (XIAP) siRNA
gtgttgaccaggctggtctcgaa

SEQ ID NO: 17545 - DNA, 23 bp, Artificial Sequence
  Description of Artificial Sequence: Synthetic oligonucleotide
  X-linked inhibitor of apoptosis (XIAP) siRNA
tgttgaccaggctggtctcgaac

SEQ ID NO: 17546 - DNA, 23 bp, Artificial Sequence
  Description of Artificial Sequence: Synthetic oligonucleotide
  X-linked inhibitor of apoptosis (XIAP) siRNA
gttgaccaggctggtctcgaact

SEQ ID NO: 17547 - DNA, 23 bp, Artificial Sequence
  Description of Artificial Sequence: Synthetic oligonucleotide
  X-linked inhibitor of apoptosis (XIAP) siRNA
ttgaccaggctggtctcgaactc

SEQ ID NO: 17548 - DNA, 23 bp, Artificial Sequence
  Description of Artificial Sequence: Synthetic oligonucleotide
  X-linked inhibitor of apoptosis (XIAP) siRNA
tgaccaggctggtctcgaactcc

SEQ ID NO: 17549 - DNA, 23 bp, Artificial Sequence
  Description of Artificial Sequence: Synthetic oligonucleotide
  X-linked inhibitor of apoptosis (XIAP) siRNA
gaccaggctggtctcgaactcct

SEQ ID NO: 17550 - DNA, 23 bp, Artificial Sequence
  Description of Artificial Sequence: Synthetic oligonucleotide
  X-linked inhibitor of apoptosis (XIAP) siRNA
accaggctggtctcgaactcctg

SEQ ID NO: 17551 - DNA, 23 bp, Artificial Sequence
  Description of Artificial Sequence: Synthetic oligonucleotide
  X-linked inhibitor of apoptosis (XIAP) siRNA
ccaggctggtctcgaactcctga

SEQ ID NO: 17552 - DNA, 23 bp, Artificial Sequence
  Description of Artificial Sequence: Synthetic oligonucleotide
  X-linked inhibitor of apoptosis (XIAP) siRNA
caggctggtctcgaactcctgat

SEQ ID NO: 17553 - DNA, 23 bp, Artificial Sequence
  Description of Artificial Sequence: Synthetic oligonucleotide
  X-linked inhibitor of apoptosis (XIAP) siRNA
aggctggtctcgaactcctgatc

SEQ ID NO: 17554 - DNA, 23 bp, Artificial Sequence
  Description of Artificial Sequence: Synthetic oligonucleotide
  X-linked inhibitor of apoptosis (XIAP) siRNA
ggctggtctcgaactcctgatct

SEQ ID NO: 17555 - DNA, 23 bp, Artificial Sequence
  Description of Artificial Sequence: Synthetic oligonucleotide
  X-linked inhibitor of apoptosis (XIAP) siRNA
gctggtctcgaactcctgatctc

SEQ ID NO: 17556 - DNA, 23 bp, Artificial Sequence
  Description of Artificial Sequence: Synthetic oligonucleotide
  X-linked inhibitor of apoptosis (XIAP) siRNA
ctggtctcgaactcctgatctca

SEQ ID NO: 17557 - DNA, 23 bp, Artificial Sequence
  Description of Artificial Sequence: Synthetic oligonucleotide
  X-linked inhibitor of apoptosis (XIAP) siRNA
tggtctcgaactcctgatctcag

SEQ ID NO: 17558 - DNA, 23 bp, Artificial Sequence
  Description of Artificial Sequence: Synthetic oligonucleotide
  X-linked inhibitor of apoptosis (XIAP) siRNA
ggtctcgaactcctgatctcagg

SEQ ID NO: 17559 - DNA, 23 bp, Artificial Sequence
  Description of Artificial Sequence: Synthetic oligonucleotide
  X-linked inhibitor of apoptosis (XIAP) siRNA
gtctcgaactcctgatctcaggt

SEQ ID NO: 17560 - DNA, 23 bp, Artificial Sequence
  Description of Artificial Sequence: Synthetic oligonucleotide
  X-linked inhibitor of apoptosis (XIAP) siRNA
tctcgaactcctgatctcaggtg

SEQ ID NO: 17561 - DNA, 23 bp, Artificial Sequence
  Description of Artificial Sequence: Synthetic oligonucleotide
  X-linked inhibitor of apoptosis (XIAP) siRNA
ctcgaactcctgatctcaggtga

SEQ ID NO: 17562 - DNA, 23 bp, Artificial Sequence
  Description of Artificial Sequence: Synthetic oligonucleotide
  X-linked inhibitor of apoptosis (XIAP) siRNA
tcgaactcctgatctcaggtgat

SEQ ID NO: 17563 - DNA, 23 bp, Artificial Sequence
  Description of Artificial Sequence: Synthetic oligonucleotide
  X-linked inhibitor of apoptosis (XIAP) siRNA
cgaactcctgatctcaggtgatc

SEQ ID NO: 17564 - DNA, 23 bp, Artificial Sequence
  Description of Artificial Sequence: Synthetic oligonucleotide
  X-linked inhibitor of apoptosis (XIAP) siRNA
gaactcctgatctcaggtgatct

SEQ ID NO: 17565 - DNA, 23 bp, Artificial Sequence
  Description of Artificial Sequence: Synthetic oligonucleotide
  X-linked inhibitor of apoptosis (XIAP) siRNA
aactcctgatctcaggtgatctg

SEQ ID NO: 17566 - DNA, 23 bp, Artificial Sequence
  Description of Artificial Sequence: Synthetic oligonucleotide
  X-linked inhibitor of apoptosis (XIAP) siRNA
actcctgatctcaggtgatctgc

SEQ ID NO: 17567 - DNA, 23 bp, Artificial Sequence
  Description of Artificial Sequence: Synthetic oligonucleotide
  X-linked inhibitor of apoptosis (XIAP) siRNA
ctcctgatctcaggtgatctgcc

SEQ ID NO: 17568 - DNA, 23 bp, Artificial Sequence
  Description of Artificial Sequence: Synthetic oligonucleotide
  X-linked inhibitor of apoptosis (XIAP) siRNA
tcctgatctcaggtgatctgcct

SEQ ID NO: 17569 - DNA, 23 bp, Artificial Sequence
  Description of Artificial Sequence: Synthetic oligonucleotide
  X-linked inhibitor of apoptosis (XIAP) siRNA
cctgatctcaggtgatctgcctg

SEQ ID NO: 17570 - DNA, 23 bp, Artificial Sequence
  Description of Artificial Sequence: Synthetic oligonucleotide
  X-linked inhibitor of apoptosis (XIAP) siRNA
ctgatctcaggtgatctgcctgc

SEQ ID NO: 17571 - DNA, 23 bp, Artificial Sequence
  Description of Artificial Sequence: Synthetic oligonucleotide
  X-linked inhibitor of apoptosis (XIAP) siRNA
tgatctcaggtgatctgcctgcc

SEQ ID NO: 17572 - DNA, 23 bp, Artificial Sequence
  Description of Artificial Sequence: Synthetic oligonucleotide
  X-linked inhibitor of apoptosis (XIAP) siRNA
gatctcaggtgatctgcctgcct

SEQ ID NO: 17573 - DNA, 23 bp, Artificial Sequence
  Description of Artificial Sequence: Synthetic oligonucleotide
  X-linked inhibitor of apoptosis (XIAP) siRNA
atctcaggtgatctgcctgcctc

SEQ ID NO: 17574 - DNA, 23 bp, Artificial Sequence
  Description of Artificial Sequence: Synthetic oligonucleotide
  X-linked inhibitor of apoptosis (XIAP) siRNA
tctcaggtgatctgcctgcctcg

SEQ ID NO: 17575 - DNA, 23 bp, Artificial Sequence
  Description of Artificial Sequence: Synthetic oligonucleotide
  X-linked inhibitor of apoptosis (XIAP) siRNA
ctcaggtgatctgcctgcctcgg

SEQ ID NO: 17576 - DNA, 23 bp, Artificial Sequence
  Description of Artificial Sequence: Synthetic oligonucleotide
  X-linked inhibitor of apoptosis (XIAP) siRNA
tcaggtgatctgcctgcctcggc

SEQ ID NO: 17577 - DNA, 23 bp, Artificial Sequence
  Description of Artificial Sequence: Synthetic oligonucleotide
  X-linked inhibitor of apoptosis (XIAP) siRNA
caggtgatctgcctgcctcggcc

SEQ ID NO: 17578 - DNA, 23 bp, Artificial Sequence
  Description of Artificial Sequence: Synthetic oligonucleotide
  X-linked inhibitor of apoptosis (XIAP) siRNA
aggtgatctgcctgcctcggcct

SEQ ID NO: 17579 - DNA, 23 bp, Artificial Sequence
  Description of Artificial Sequence: Synthetic oligonucleotide
  X-linked inhibitor of apoptosis (XIAP) siRNA
ggtgatctgcctgcctcggcctc

SEQ ID NO: 17580 - DNA, 23 bp, Artificial Sequence
  Description of Artificial Sequence: Synthetic oligonucleotide
  X-linked inhibitor of apoptosis (XIAP) siRNA
gtgatctgcctgcctcggcctca

SEQ ID NO: 17581 - DNA, 23 bp, Artificial Sequence
  Description of Artificial Sequence: Synthetic oligonucleotide
  X-linked inhibitor of apoptosis (XIAP) siRNA
tgatctgcctgcctcggcctcac

SEQ ID NO: 17582 - DNA, 23 bp, Artificial Sequence
  Description of Artificial Sequence: Synthetic oligonucleotide
  X-linked inhibitor of apoptosis (XIAP) siRNA
gatctgcctgcctcggcctcaca

SEQ ID NO: 17583 - DNA, 23 bp, Artificial Sequence
  Description of Artificial Sequence: Synthetic oligonucleotide
  X-linked inhibitor of apoptosis (XIAP) siRNA
atctgcctgcctcggcctcacaa

SEQ ID NO: 17584 - DNA, 23 bp, Artificial Sequence
  Description of Artificial Sequence: Synthetic oligonucleotide
  X-linked inhibitor of apoptosis (XIAP) siRNA
tctgcctgcctcggcctcacaaa

SEQ ID NO: 17585 - DNA, 23 bp, Artificial Sequence
  Description of Artificial Sequence: Synthetic oligonucleotide
  X-linked inhibitor of apoptosis (XIAP) siRNA
ctgcctgcctcggcctcacaaag

SEQ ID NO: 17586 - DNA, 23 bp, Artificial Sequence
  Description of Artificial Sequence: Synthetic oligonucleotide
  X-linked inhibitor of apoptosis (XIAP) siRNA
tgcctgcctcggcctcacaaagt

SEQ ID NO: 17587 - DNA, 23 bp, Artificial Sequence
  Description of Artificial Sequence: Synthetic oligonucleotide
  X-linked inhibitor of apoptosis (XIAP) siRNA
gcctgcctcggcctcacaaagtg

SEQ ID NO: 17588 - DNA, 23 bp, Artificial Sequence
  Description of Artificial Sequence: Synthetic oligonucleotide
  X-linked inhibitor of apoptosis (XIAP) siRNA
cctgcctcggcctcacaaagtgc

SEQ ID NO: 17589 - DNA, 23 bp, Artificial Sequence
  Description of Artificial Sequence: Synthetic oligonucleotide
  X-linked inhibitor of apoptosis (XIAP) siRNA
ctgcctcggcctcacaaagtgct

SEQ ID NO: 17590 - DNA, 23 bp, Artificial Sequence
  Description of Artificial Sequence: Synthetic oligonucleotide
  X-linked inhibitor of apoptosis (XIAP) siRNA
tgcctcggcctcacaaagtgctg

SEQ ID NO: 17591 - DNA, 23 bp, Artificial Sequence
  Description of Artificial Sequence: Synthetic oligonucleotide
  X-linked inhibitor of apoptosis (XIAP) siRNA
gcctcggcctcacaaagtgctgg

SEQ ID NO: 17592 - DNA, 23 bp, Artificial Sequence
  Description of Artificial Sequence: Synthetic oligonucleotide
  X-linked inhibitor of apoptosis (XIAP) siRNA
cctcggcctcacaaagtgctggg

SEQ ID NO: 17593 - DNA, 23 bp, Artificial Sequence
  Description of Artificial Sequence: Synthetic oligonucleotide
  X-linked inhibitor of apoptosis (XIAP) siRNA
ctcggcctcacaaagtgctggga

SEQ ID NO: 17594 - DNA, 23 bp, Artificial Sequence
  Description of Artificial Sequence: Synthetic oligonucleotide
  X-linked inhibitor of apoptosis (XIAP) siRNA
tcggcctcacaaagtgctgggat

SEQ ID NO: 17595 - DNA, 23 bp, Artificial Sequence
  Description of Artificial Sequence: Synthetic oligonucleotide
  X-linked inhibitor of apoptosis (XIAP) siRNA
cggcctcacaaagtgctgggatt

SEQ ID NO: 17596 - DNA, 23 bp, Artificial Sequence
  Description of Artificial Sequence: Synthetic oligonucleotide
  X-linked inhibitor of apoptosis (XIAP) siRNA
ggcctcacaaagtgctgggatta

SEQ ID NO: 17597 - DNA, 23 bp, Artificial Sequence
  Description of Artificial Sequence: Synthetic oligonucleotide
  X-linked inhibitor of apoptosis (XIAP) siRNA
gcctcacaaagtgctgggattac

SEQ ID NO: 17598 - DNA, 23 bp, Artificial Sequence
  Description of Artificial Sequence: Synthetic oligonucleotide
  X-linked inhibitor of apoptosis (XIAP) siRNA
cctcacaaagtgctgggattaca

SEQ ID NO: 17599 - DNA, 23 bp, Artificial Sequence
  Description of Artificial Sequence: Synthetic oligonucleotide
  X-linked inhibitor of apoptosis (XIAP) siRNA
ctcacaaagtgctgggattacag

SEQ ID NO: 17600 - DNA, 23 bp, Artificial Sequence
  Description of Artificial Sequence: Synthetic oligonucleotide
  X-linked inhibitor of apoptosis (XIAP) siRNA
tcacaaagtgctgggattacagg

SEQ ID NO: 17601 - DNA, 23 bp, Artificial Sequence
  Description of Artificial Sequence: Synthetic oligonucleotide
  X-linked inhibitor of apoptosis (XIAP) siRNA
cacaaagtgctgggattacaggt

SEQ ID NO: 17602 - DNA, 23 bp, Artificial Sequence
  Description of Artificial Sequence: Synthetic oligonucleotide
  X-linked inhibitor of apoptosis (XIAP) siRNA
acaaagtgctgggattacaggtg

SEQ ID NO: 17603 - DNA, 23 bp, Artificial Sequence
  Description of Artificial Sequence: Synthetic oligonucleotide
  X-linked inhibitor of apoptosis (XIAP) siRNA
caaagtgctgggattacaggtgt

SEQ ID NO: 17604 - DNA, 23 bp, Artificial Sequence
  Description of Artificial Sequence: Synthetic oligonucleotide
  X-linked inhibitor of apoptosis (XIAP) siRNA
aaagtgctgggattacaggtgtg

SEQ ID NO: 17605 - DNA, 23 bp, Artificial Sequence
  Description of Artificial Sequence: Synthetic oligonucleotide
  X-linked inhibitor of apoptosis (XIAP) siRNA
aagtgctgggattacaggtgtga

SEQ ID NO: 17606 - DNA, 23 bp, Artificial Sequence
  Description of Artificial Sequence: Synthetic oligonucleotide
  X-linked inhibitor of apoptosis (XIAP) siRNA
agtgctgggattacaggtgtgaa

SEQ ID NO: 17607 - DNA, 23 bp, Artificial Sequence
  Description of Artificial Sequence: Synthetic oligonucleotide
  X-linked inhibitor of apoptosis (XIAP) siRNA
gtgctgggattacaggtgtgaac

SEQ ID NO: 17608 - DNA, 23 bp, Artificial Sequence
  Description of Artificial Sequence: Synthetic oligonucleotide
  X-linked inhibitor of apoptosis (XIAP) siRNA
tgctgggattacaggtgtgaacc

SEQ ID NO: 17609 - DNA, 23 bp, Artificial Sequence
  Description of Artificial Sequence: Synthetic oligonucleotide
  X-linked inhibitor of apoptosis (XIAP) siRNA
gctgggattacaggtgtgaacca

SEQ ID NO: 17610 - DNA, 23 bp, Artificial Sequence
  Description of Artificial Sequence: Synthetic oligonucleotide
  X-linked inhibitor of apoptosis (XIAP) siRNA
ctgggattacaggtgtgaaccac

SEQ ID NO: 17611 - DNA, 23 bp, Artificial Sequence
  Description of Artificial Sequence: Synthetic oligonucleotide
  X-linked inhibitor of apoptosis (XIAP) siRNA
tgggattacaggtgtgaaccact

SEQ ID NO: 17612 - DNA, 23 bp, Artificial Sequence
  Description of Artificial Sequence: Synthetic oligonucleotide
  X-linked inhibitor of apoptosis (XIAP) siRNA
gggattacaggtgtgaaccactg

SEQ ID NO: 17613 - DNA, 23 bp, Artificial Sequence
  Description of Artificial Sequence: Synthetic oligonucleotide
  X-linked inhibitor of apoptosis (XIAP) siRNA
ggattacaggtgtgaaccactgc

SEQ ID NO: 17614 - DNA, 23 bp, Artificial Sequence
  Description of Artificial Sequence: Synthetic oligonucleotide
  X-linked inhibitor of apoptosis (XIAP) siRNA
gattacaggtgtgaaccactgct

SEQ ID NO: 17615 - DNA, 23 bp, Artificial Sequence
  Description of Artificial Sequence: Synthetic oligonucleotide
  X-linked inhibitor of apoptosis (XIAP) siRNA
attacaggtgtgaaccactgctc

SEQ ID NO: 17616 - DNA, 23 bp, Artificial Sequence
  Description of Artificial Sequence: Synthetic oligonucleotide
  X-linked inhibitor of apoptosis (XIAP) siRNA
ttacaggtgtgaaccactgctcc

SEQ ID NO: 17617 - DNA, 23 bp, Artificial Sequence
  Description of Artificial Sequence: Synthetic oligonucleotide
  X-linked inhibitor of apoptosis (XIAP) siRNA
tacaggtgtgaaccactgctccc

SEQ ID NO: 17618 - DNA, 23 bp, Artificial Sequence
  Description of Artificial Sequence: Synthetic oligonucleotide
  X-linked inhibitor of apoptosis (XIAP) siRNA
acaggtgtgaaccactgctcccg

SEQ ID NO: 17619 - DNA, 23 bp, Artificial Sequence
  Description of Artificial Sequence: Synthetic oligonucleotide
  X-linked inhibitor of apoptosis (XIAP) siRNA
caggtgtgaaccactgctcccgg

SEQ ID NO: 17620 - DNA, 23 bp, Artificial Sequence
  Description of Artificial Sequence: Synthetic oligonucleotide
  X-linked inhibitor of apoptosis (XIAP) siRNA
aggtgtgaaccactgctcccggc

SEQ ID NO: 17621 - DNA, 23 bp, Artificial Sequence
  Description of Artificial Sequence: Synthetic oligonucleotide
  X-linked inhibitor of apoptosis (XIAP) siRNA
ggtgtgaaccactgctcccggcc

SEQ ID NO: 17622 - DNA, 23 bp, Artificial Sequence
  Description of Artificial Sequence: Synthetic oligonucleotide
  X-linked inhibitor of apoptosis (XIAP) siRNA
gtgtgaaccactgctcccggcct

SEQ ID NO: 17623 - DNA, 23 bp, Artificial Sequence
  Description of Artificial Sequence: Synthetic oligonucleotide
  X-linked inhibitor of apoptosis (XIAP) siRNA
tgtgaaccactgctcccggcctt

SEQ ID NO: 17624 - DNA, 23 bp, Artificial Sequence
  Description of Artificial Sequence: Synthetic oligonucleotide
  X-linked inhibitor of apoptosis (XIAP) siRNA
gtgaaccactgctcccggccttg

SEQ ID NO: 17625 - DNA, 23 bp, Artificial Sequence
  Description of Artificial Sequence: Synthetic oligonucleotide
  X-linked inhibitor of apoptosis (XIAP) siRNA
tgaaccactgctcccggccttgt

SEQ ID NO: 17626 - DNA, 23 bp, Artificial Sequence
  Description of Artificial Sequence: Synthetic oligonucleotide
  X-linked inhibitor of apoptosis (XIAP) siRNA
gaaccactgctcccggccttgtg

SEQ ID NO: 17627 - DNA, 23 bp, Artificial Sequence
  Description of Artificial Sequence: Synthetic oligonucleotide
  X-linked inhibitor of apoptosis (XIAP) siRNA
aaccactgctcccggccttgtgt

SEQ ID NO: 17628 - DNA, 23 bp, Artificial Sequence
  Description of Artificial Sequence: Synthetic oligonucleotide
  X-linked inhibitor of apoptosis (XIAP) siRNA
accactgctcccggccttgtgtg

SEQ ID NO: 17629 - DNA, 23 bp, Artificial Sequence
  Description of Artificial Sequence: Synthetic oligonucleotide
  X-linked inhibitor of apoptosis (XIAP) siRNA
ccactgctcccggccttgtgtga

SEQ ID NO: 17630 - DNA, 23 bp, Artificial Sequence
  Description of Artificial Sequence: Synthetic oligonucleotide
  X-linked inhibitor of apoptosis (XIAP) siRNA
cactgctcccggccttgtgtgat

SEQ ID NO: 17631 - DNA, 23 bp, Artificial Sequence
  Description of Artificial Sequence: Synthetic oligonucleotide
  X-linked inhibitor of apoptosis (XIAP) siRNA
actgctcccggccttgtgtgatt

SEQ ID NO: 17632 - DNA, 23 bp, Artificial Sequence
  Description of Artificial Sequence: Synthetic oligonucleotide
  X-linked inhibitor of apoptosis (XIAP) siRNA
ctgctcccggccttgtgtgattt

SEQ ID NO: 17633 - DNA, 23 bp, Artificial Sequence
  Description of Artificial Sequence: Synthetic oligonucleotide
  X-linked inhibitor of apoptosis (XIAP) siRNA
tgctcccggccttgtgtgatttt

SEQ ID NO: 17634 - DNA, 23 bp, Artificial Sequence
  Description of Artificial Sequence: Synthetic oligonucleotide
  X-linked inhibitor of apoptosis (XIAP) siRNA
gctcccggccttgtgtgatttta

SEQ ID NO: 17635 - DNA, 23 bp, Artificial Sequence
  Description of Artificial Sequence: Synthetic oligonucleotide
  X-linked inhibitor of apoptosis (XIAP) siRNA
ctcccggccttgtgtgattttat

SEQ ID NO: 17636 - DNA, 23 bp, Artificial Sequence
  Description of Artificial Sequence: Synthetic oligonucleotide
  X-linked inhibitor of apoptosis (XIAP) siRNA
tcccggccttgtgtgattttatc

SEQ ID NO: 17637 - DNA, 23 bp, Artificial Sequence
  Description of Artificial Sequence: Synthetic oligonucleotide
  X-linked inhibitor of apoptosis (XIAP) siRNA
cccggccttgtgtgattttatct

SEQ ID NO: 17638 - DNA, 23 bp, Artificial Sequence
  Description of Artificial Sequence: Synthetic oligonucleotide
  X-linked inhibitor of apoptosis (XIAP) siRNA
ccggccttgtgtgattttatcta

SEQ ID NO: 17639 - DNA, 23 bp, Artificial Sequence
  Description of Artificial Sequence: Synthetic oligonucleotide
  X-linked inhibitor of apoptosis (XIAP) siRNA
cggccttgtgtgattttatctaa

SEQ ID NO: 17640 - DNA, 23 bp, Artificial Sequence
  Description of Artificial Sequence: Synthetic oligonucleotide
  X-linked inhibitor of apoptosis (XIAP) siRNA
ggccttgtgtgattttatctaag

SEQ ID NO: 17641 - DNA, 23 bp, Artificial Sequence
  Description of Artificial Sequence: Synthetic oligonucleotide
  X-linked inhibitor of apoptosis (XIAP) siRNA
gccttgtgtgattttatctaagg

SEQ ID NO: 17642 - DNA, 23 bp, Artificial Sequence
  Description of Artificial Sequence: Synthetic oligonucleotide
  X-linked inhibitor of apoptosis (XIAP) siRNA
ccttgtgtgattttatctaaggg

SEQ ID NO: 17643 - DNA, 23 bp, Artificial Sequence
  Description of Artificial Sequence: Synthetic oligonucleotide
  X-linked inhibitor of apoptosis (XIAP) siRNA
cttgtgtgattttatctaaggga

SEQ ID NO: 17644 - DNA, 23 bp, Artificial Sequence
  Description of Artificial Sequence: Synthetic oligonucleotide
  X-linked inhibitor of apoptosis (XIAP) siRNA
ttgtgtgattttatctaagggac

SEQ ID NO: 17645 - DNA, 23 bp, Artificial Sequence
  Description of Artificial Sequence: Synthetic oligonucleotide
  X-linked inhibitor of apoptosis (XIAP) siRNA
tgtgtgattttatctaagggact

SEQ ID NO: 17646 - DNA, 23 bp, Artificial Sequence
  Description of Artificial Sequence: Synthetic oligonucleotide
  X-linked inhibitor of apoptosis (XIAP) siRNA
gtgtgattttatctaagggactt

SEQ ID NO: 17647 - DNA, 23 bp, Artificial Sequence
  Description of Artificial Sequence: Synthetic oligonucleotide
  X-linked inhibitor of apoptosis (XIAP) siRNA
tgtgattttatctaagggactta

SEQ ID NO: 17648 - DNA, 23 bp, Artificial Sequence
  Description of Artificial Sequence: Synthetic oligonucleotide
  X-linked inhibitor of apoptosis (XIAP) siRNA
gtgattttatctaagggacttaa

SEQ ID NO: 17649 - DNA, 23 bp, Artificial Sequence
  Description of Artificial Sequence: Synthetic oligonucleotide
  X-linked inhibitor of apoptosis (XIAP) siRNA
tgattttatctaagggacttaag

SEQ ID NO: 17650 - DNA, 23 bp, Artificial Sequence
  Description of Artificial Sequence: Synthetic oligonucleotide
  X-linked inhibitor of apoptosis (XIAP) siRNA
gattttatctaagggacttaagc

SEQ ID NO: 17651 - DNA, 23 bp, Artificial Sequence
  Description of Artificial Sequence: Synthetic oligonucleotide
  X-linked inhibitor of apoptosis (XIAP) siRNA
attttatctaagggacttaagcg

SEQ ID NO: 17652 - DNA, 23 bp, Artificial Sequence
  Description of Artificial Sequence: Synthetic oligonucleotide
  X-linked inhibitor of apoptosis (XIAP) siRNA
ttttatctaagggacttaagcgt

SEQ ID NO: 17653 - DNA, 23 bp, Artificial Sequence
  Description of Artificial Sequence: Synthetic oligonucleotide
  X-linked inhibitor of apoptosis (XIAP) siRNA
tttatctaagggacttaagcgtc

SEQ ID NO: 17654 - DNA, 23 bp, Artificial Sequence
  Description of Artificial Sequence: Synthetic oligonucleotide
  X-linked inhibitor of apoptosis (XIAP) siRNA
ttatctaagggacttaagcgtcc

SEQ ID NO: 17655 - DNA, 23 bp, Artificial Sequence
  Description of Artificial Sequence: Synthetic oligonucleotide
  X-linked inhibitor of apoptosis (XIAP) siRNA
tatctaagggacttaagcgtcct

SEQ ID NO: 17656 - DNA, 23 bp, Artificial Sequence
  Description of Artificial Sequence: Synthetic oligonucleotide
  X-linked inhibitor of apoptosis (XIAP) siRNA
atctaagggacttaagcgtcctc

SEQ ID NO: 17657 - DNA, 23 bp, Artificial Sequence
  Description of Artificial Sequence: Synthetic oligonucleotide
  X-linked inhibitor of apoptosis (XIAP) siRNA
tctaagggacttaagcgtcctca

SEQ ID NO: 17658 - DNA, 23 bp, Artificial Sequence
  Description of Artificial Sequence: Synthetic oligonucleotide
  X-linked inhibitor of apoptosis (XIAP) siRNA
ctaagggacttaagcgtcctcag

SEQ ID NO: 17659 - DNA, 23 bp, Artificial Sequence
  Description of Artificial Sequence: Synthetic oligonucleotide
  X-linked inhibitor of apoptosis (XIAP) siRNA
taagggacttaagcgtcctcagg

SEQ ID NO: 17660 - DNA, 23 bp, Artificial Sequence
  Description of Artificial Sequence: Synthetic oligonucleotide
  X-linked inhibitor of apoptosis (XIAP) siRNA
aagggacttaagcgtcctcaggt

SEQ ID NO: 17661 - DNA, 23 bp, Artificial Sequence
  Description of Artificial Sequence: Synthetic oligonucleotide
  X-linked inhibitor of apoptosis (XIAP) siRNA
agggacttaagcgtcctcaggtc

SEQ ID NO: 17662 - DNA, 23 bp, Artificial Sequence
  Description of Artificial Sequence: Synthetic oligonucleotide
  X-linked inhibitor of apoptosis (XIAP) siRNA
gggacttaagcgtcctcaggtcc

SEQ ID NO: 17663 - DNA, 23 bp, Artificial Sequence
  Description of Artificial Sequence: Synthetic oligonucleotide
  X-linked inhibitor of apoptosis (XIAP) siRNA
ggacttaagcgtcctcaggtcct

SEQ ID NO: 17664 - DNA, 23 bp, Artificial Sequence
  Description of Artificial Sequence: Synthetic oligonucleotide
  X-linked inhibitor of apoptosis (XIAP) siRNA
gacttaagcgtcctcaggtccta

SEQ ID NO: 17665 - DNA, 23 bp, Artificial Sequence
  Description of Artificial Sequence: Synthetic oligonucleotide
  X-linked inhibitor of apoptosis (XIAP) siRNA
acttaagcgtcctcaggtcctag

SEQ ID NO: 17666 - DNA, 23 bp, Artificial Sequence
  Description of Artificial Sequence: Synthetic oligonucleotide
  X-linked inhibitor of apoptosis (XIAP) siRNA
cttaagcgtcctcaggtcctagg

SEQ ID NO: 17667 - DNA, 23 bp, Artificial Sequence
  Description of Artificial Sequence: Synthetic oligonucleotide
  X-linked inhibitor of apoptosis (XIAP) siRNA
ttaagcgtcctcaggtcctaggg

SEQ ID NO: 17668 - DNA, 23 bp, Artificial Sequence
  Description of Artificial Sequence: Synthetic oligonucleotide
  X-linked inhibitor of apoptosis (XIAP) siRNA
taagcgtcctcaggtcctagggg

SEQ ID NO: 17669 - DNA, 23 bp, Artificial Sequence
  Description of Artificial Sequence: Synthetic oligonucleotide
  X-linked inhibitor of apoptosis (XIAP) siRNA
aagcgtcctcaggtcctaggggg

SEQ ID NO: 17670 - DNA, 23 bp, Artificial Sequence
  Description of Artificial Sequence: Synthetic oligonucleotide
  X-linked inhibitor of apoptosis (XIAP) siRNA
agcgtcctcaggtcctagggggt

SEQ ID NO: 17671 - DNA, 23 bp, Artificial Sequence
  Description of Artificial Sequence: Synthetic oligonucleotide
  X-linked inhibitor of apoptosis (XIAP) siRNA
gcgtcctcaggtcctagggggtc

SEQ ID NO: 17672 - DNA, 23 bp, Artificial Sequence
  Description of Artificial Sequence: Synthetic oligonucleotide
  X-linked inhibitor of apoptosis (XIAP) siRNA
cgtcctcaggtcctagggggtcg

SEQ ID NO: 17673 - DNA, 23 bp, Artificial Sequence
  Description of Artificial Sequence: Synthetic oligonucleotide
  X-linked inhibitor of apoptosis (XIAP) siRNA
gtcctcaggtcctagggggtcgt

SEQ ID NO: 17674 - DNA, 23 bp, Artificial Sequence
  Description of Artificial Sequence: Synthetic oligonucleotide
  X-linked inhibitor of apoptosis (XIAP) siRNA
tcctcaggtcctagggggtcgtg

SEQ ID NO: 17675 - DNA, 23 bp, Artificial Sequence
  Description of Artificial Sequence: Synthetic oligonucleotide
  X-linked inhibitor of apoptosis (XIAP) siRNA
cctcaggtcctagggggtcgtga

SEQ ID NO: 17676 - DNA, 23 bp, Artificial Sequence
  Description of Artificial Sequence: Synthetic oligonucleotide
  X-linked inhibitor of apoptosis (XIAP) siRNA
ctcaggtcctagggggtcgtgaa

SEQ ID NO: 17677 - DNA, 23 bp, Artificial Sequence
  Description of Artificial Sequence: Synthetic oligonucleotide
  X-linked inhibitor of apoptosis (XIAP) siRNA
tcaggtcctagggggtcgtgaaa

SEQ ID NO: 17678 - DNA, 23 bp, Artificial Sequence
  Description of Artificial Sequence: Synthetic oligonucleotide
  X-linked inhibitor of apoptosis (XIAP) siRNA
caggtcctagggggtcgtgaaac

SEQ ID NO: 17679 - DNA, 23 bp, Artificial Sequence
  Description of Artificial Sequence: Synthetic oligonucleotide
  X-linked inhibitor of apoptosis (XIAP) siRNA
aggtcctagggggtcgtgaaacc

SEQ ID NO: 17680 - DNA, 23 bp, Artificial Sequence
  Description of Artificial Sequence: Synthetic oligonucleotide
  X-linked inhibitor of apoptosis (XIAP) siRNA
ggtcctagggggtcgtgaaacca

SEQ ID NO: 17681 - DNA, 23 bp, Artificial Sequence
  Description of Artificial Sequence: Synthetic oligonucleotide
  X-linked inhibitor of apoptosis (XIAP) siRNA
gtcctagggggtcgtgaaaccaa

SEQ ID NO: 17682 - DNA, 23 bp, Artificial Sequence
  Description of Artificial Sequence: Synthetic oligonucleotide
  X-linked inhibitor of apoptosis (XIAP) siRNA
tcctagggggtcgtgaaaccaaa

SEQ ID NO: 17683 - DNA, 23 bp, Artificial Sequence
  Description of Artificial Sequence: Synthetic oligonucleotide
  X-linked inhibitor of apoptosis (XIAP) siRNA
cctagggggtcgtgaaaccaaaa

SEQ ID NO: 17684 - DNA, 23 bp, Artificial Sequence
  Description of Artificial Sequence: Synthetic oligonucleotide
  X-linked inhibitor of apoptosis (XIAP) siRNA
ctagggggtcgtgaaaccaaaac

SEQ ID NO: 17685 - DNA, 23 bp, Artificial Sequence
  Description of Artificial Sequence: Synthetic oligonucleotide
  X-linked inhibitor of apoptosis (XIAP) siRNA
tagggggtcgtgaaaccaaaacc

SEQ ID NO: 17686 - DNA, 23 bp, Artificial Sequence
  Description of Artificial Sequence: Synthetic oligonucleotide
  X-linked inhibitor of apoptosis (XIAP) siRNA
agggggtcgtgaaaccaaaaccc

SEQ ID NO: 17687 - DNA, 23 bp, Artificial Sequence
  Description of Artificial Sequence: Synthetic oligonucleotide
  X-linked inhibitor of apoptosis (XIAP) siRNA
gggggtcgtgaaaccaaaacccc

SEQ ID NO: 17688 - DNA, 23 bp, Artificial Sequence
  Description of Artificial Sequence: Synthetic oligonucleotide
  X-linked inhibitor of apoptosis (XIAP) siRNA
ggggtcgtgaaaccaaaacccca

SEQ ID NO: 17689 - DNA, 23 bp, Artificial Sequence
  Description of Artificial Sequence: Synthetic oligonucleotide
  X-linked inhibitor of apoptosis (XIAP) siRNA
gggtcgtgaaaccaaaaccccag

SEQ ID NO: 17690 - DNA, 23 bp, Artificial Sequence
  Description of Artificial Sequence: Synthetic oligonucleotide
  X-linked inhibitor of apoptosis (XIAP) siRNA
ggtcgtgaaaccaaaaccccagg

SEQ ID NO: 17691 - DNA, 23 bp, Artificial Sequence
  Description of Artificial Sequence: Synthetic oligonucleotide
  X-linked inhibitor of apoptosis (XIAP) siRNA
gtcgtgaaaccaaaaccccaggg

SEQ ID NO: 17692 - DNA, 23 bp, Artificial Sequence
  Description of Artificial Sequence: Synthetic oligonucleotide
  X-linked inhibitor of apoptosis (XIAP) siRNA
tcgtgaaaccaaaaccccaggga

SEQ ID NO: 17693 - DNA, 23 bp, Artificial Sequence
  Description of Artificial Sequence: Synthetic oligonucleotide
  X-linked inhibitor of apoptosis (XIAP) siRNA
cgtgaaaccaaaaccccagggat

SEQ ID NO: 17694 - DNA, 23 bp, Artificial Sequence
  Description of Artificial Sequence: Synthetic oligonucleotide
  X-linked inhibitor of apoptosis (XIAP) siRNA
gtgaaaccaaaaccccagggata

SEQ ID NO: 17695 - DNA, 23 bp, Artificial Sequence
  Description of Artificial Sequence: Synthetic oligonucleotide
  X-linked inhibitor of apoptosis (XIAP) siRNA
tgaaaccaaaaccccagggatag

SEQ ID NO: 17696 - DNA, 23 bp, Artificial Sequence
  Description of Artificial Sequence: Synthetic oligonucleotide
  X-linked inhibitor of apoptosis (XIAP) siRNA
gaaaccaaaaccccagggatagc

SEQ ID NO: 17697 - DNA, 23 bp, Artificial Sequence
  Description of Artificial Sequence: Synthetic oligonucleotide
  X-linked inhibitor of apoptosis (XIAP) siRNA
aaaccaaaaccccagggatagca

SEQ ID NO: 17698 - DNA, 23 bp, Artificial Sequence
  Description of Artificial Sequence: Synthetic oligonucleotide
  X-linked inhibitor of apoptosis (XIAP) siRNA
aaccaaaaccccagggatagcaa

SEQ ID NO: 17699 - DNA, 23 bp, Artificial Sequence
  Description of Artificial Sequence: Synthetic oligonucleotide
  X-linked inhibitor of apoptosis (XIAP) siRNA
accaaaaccccagggatagcaag

SEQ ID NO: 17700 - DNA, 23 bp, Artificial Sequence
  Description of Artificial Sequence: Synthetic oligonucleotide
  X-linked inhibitor of apoptosis (XIAP) siRNA
ccaaaaccccagggatagcaagg

SEQ ID NO: 17701 - DNA, 23 bp, Artificial Sequence
  Description of Artificial Sequence: Synthetic oligonucleotide
  X-linked inhibitor of apoptosis (XIAP) siRNA
caaaaccccagggatagcaaggg

SEQ ID NO: 17702 - DNA, 23 bp, Artificial Sequence
  Description of Artificial Sequence: Synthetic oligonucleotide
  X-linked inhibitor of apoptosis (XIAP) siRNA
aaaaccccagggatagcaaggga

SEQ ID NO: 17703 - DNA, 23 bp, Artificial Sequence
  Description of Artificial Sequence: Synthetic oligonucleotide
  X-linked inhibitor of apoptosis (XIAP) siRNA
aaaccccagggatagcaagggac

SEQ ID NO: 17704 - DNA, 23 bp, Artificial Sequence
  Description of Artificial Sequence: Synthetic oligonucleotide
  X-linked inhibitor of apoptosis (XIAP) siRNA
aaccccagggatagcaagggaca

SEQ ID NO: 17705 - DNA, 23 bp, Artificial Sequence
  Description of Artificial Sequence: Synthetic oligonucleotide
  X-linked inhibitor of apoptosis (XIAP) siRNA
accccagggatagcaagggacaa

SEQ ID NO: 17706 - DNA, 23 bp, Artificial Sequence
  Description of Artificial Sequence: Synthetic oligonucleotide
  X-linked inhibitor of apoptosis (XIAP) siRNA
ccccagggatagcaagggacaat

SEQ ID NO: 17707 - DNA, 23 bp, Artificial Sequence
  Description of Artificial Sequence: Synthetic oligonucleotide
  X-linked inhibitor of apoptosis (XIAP) siRNA
cccagggatagcaagggacaatt

SEQ ID NO: 17708 - DNA, 23 bp, Artificial Sequence
  Description of Artificial Sequence: Synthetic oligonucleotide
  X-linked inhibitor of apoptosis (XIAP) siRNA
ccagggatagcaagggacaattg

SEQ ID NO: 17709 - DNA, 23 bp, Artificial Sequence
  Description of Artificial Sequence: Synthetic oligonucleotide
  X-linked inhibitor of apoptosis (XIAP) siRNA
cagggatagcaagggacaattgt

SEQ ID NO: 17710 - DNA, 23 bp, Artificial Sequence
  Description of Artificial Sequence: Synthetic oligonucleotide
  X-linked inhibitor of apoptosis (XIAP) siRNA
agggatagcaagggacaattgta

SEQ ID NO: 17711 - DNA, 23 bp, Artificial Sequence
  Description of Artificial Sequence: Synthetic oligonucleotide
  X-linked inhibitor of apoptosis (XIAP) siRNA
gggatagcaagggacaattgtat

SEQ ID NO: 17712 - DNA, 23 bp, Artificial Sequence
  Description of Artificial Sequence: Synthetic oligonucleotide
  X-linked inhibitor of apoptosis (XIAP) siRNA
ggatagcaagggacaattgtatc

SEQ ID NO: 17713 - DNA, 23 bp, Artificial Sequence
  Description of Artificial Sequence: Synthetic oligonucleotide
  X-linked inhibitor of apoptosis (XIAP) siRNA
gatagcaagggacaattgtatct

SEQ ID NO: 17714 - DNA, 23 bp, Artificial Sequence
  Description of Artificial Sequence: Synthetic oligonucleotide
  X-linked inhibitor of apoptosis (XIAP) siRNA
atagcaagggacaattgtatctt

SEQ ID NO: 17715 - DNA, 23 bp, Artificial Sequence
  Description of Artificial Sequence: Synthetic oligonucleotide
  X-linked inhibitor of apoptosis (XIAP) siRNA
tagcaagggacaattgtatcttc

SEQ ID NO: 17716 - DNA, 23 bp, Artificial Sequence
  Description of Artificial Sequence: Synthetic oligonucleotide
  X-linked inhibitor of apoptosis (XIAP) siRNA
agcaagggacaattgtatcttca

SEQ ID NO: 17717 - DNA, 23 bp, Artificial Sequence
  Description of Artificial Sequence: Synthetic oligonucleotide
  X-linked inhibitor of apoptosis (XIAP) siRNA
gcaagggacaattgtatcttcaa

SEQ ID NO: 17718 - DNA, 23 bp, Artificial Sequence
  Description of Artificial Sequence: Synthetic oligonucleotide
  X-linked inhibitor of apoptosis (XIAP) siRNA
caagggacaattgtatcttcaaa

SEQ ID NO: 17719 - DNA, 23 bp, Artificial Sequence
  Description of Artificial Sequence: Synthetic oligonucleotide
  X-linked inhibitor of apoptosis (XIAP) siRNA
aagggacaattgtatcttcaaag

SEQ ID NO: 17720 - DNA, 23 bp, Artificial Sequence
  Description of Artificial Sequence: Synthetic oligonucleotide
  X-linked inhibitor of apoptosis (XIAP) siRNA
agggacaattgtatcttcaaagt

SEQ ID NO: 17721 - DNA, 23 bp, Artificial Sequence
  Description of Artificial Sequence: Synthetic oligonucleotide
  X-linked inhibitor of apoptosis (XIAP) siRNA
gggacaattgtatcttcaaagta

SEQ ID NO: 17722 - DNA, 23 bp, Artificial Sequence
  Description of Artificial Sequence: Synthetic oligonucleotide
  X-linked inhibitor of apoptosis (XIAP) siRNA
ggacaattgtatcttcaaagtag

SEQ ID NO: 17723 - DNA, 23 bp, Artificial Sequence
  Description of Artificial Sequence: Synthetic oligonucleotide
  X-linked inhibitor of apoptosis (XIAP) siRNA
gacaattgtatcttcaaagtaga

SEQ ID NO: 17724 - DNA, 23 bp, Artificial Sequence
  Description of Artificial Sequence: Synthetic oligonucleotide
  X-linked inhibitor of apoptosis (XIAP) siRNA
acaattgtatcttcaaagtagac

SEQ ID NO: 17725 - DNA, 23 bp, Artificial Sequence
  Description of Artificial Sequence: Synthetic oligonucleotide
  X-linked inhibitor of apoptosis (XIAP) siRNA
caattgtatcttcaaagtagaca

SEQ ID NO: 17726 - DNA, 23 bp, Artificial Sequence
  Description of Artificial Sequence: Synthetic oligonucleotide
  X-linked inhibitor of apoptosis (XIAP) siRNA
aattgtatcttcaaagtagacaa

SEQ ID NO: 17727 - DNA, 23 bp, Artificial Sequence
  Description of Artificial Sequence: Synthetic oligonucleotide
  X-linked inhibitor of apoptosis (XIAP) siRNA
attgtatcttcaaagtagacaaa

SEQ ID NO: 17728 - DNA, 23 bp, Artificial Sequence
  Description of Artificial Sequence: Synthetic oligonucleotide
  X-linked inhibitor of apoptosis (XIAP) siRNA
ttgtatcttcaaagtagacaaat

SEQ ID NO: 17729 - DNA, 23 bp, Artificial Sequence
  Description of Artificial Sequence: Synthetic oligonucleotide
  X-linked inhibitor of apoptosis (XIAP) siRNA
tgtatcttcaaagtagacaaatg

SEQ ID NO: 17730 - DNA, 23 bp, Artificial Sequence
  Description of Artificial Sequence: Synthetic oligonucleotide
  X-linked inhibitor of apoptosis (XIAP) siRNA
gtatcttcaaagtagacaaatgg

SEQ ID NO: 17731 - DNA, 23 bp, Artificial Sequence
  Description of Artificial Sequence: Synthetic oligonucleotide
  X-linked inhibitor of apoptosis (XIAP) siRNA
tatcttcaaagtagacaaatggc

SEQ ID NO: 17732 - DNA, 23 bp, Artificial Sequence
  Description of Artificial Sequence: Synthetic oligonucleotide
  X-linked inhibitor of apoptosis (XIAP) siRNA
atcttcaaagtagacaaatggcg

SEQ ID NO: 17733 - DNA, 23 bp, Artificial Sequence
  Description of Artificial Sequence: Synthetic oligonucleotide
  X-linked inhibitor of apoptosis (XIAP) siRNA
tcttcaaagtagacaaatggcgc

SEQ ID NO: 17734 - DNA, 23 bp, Artificial Sequence
  Description of Artificial Sequence: Synthetic oligonucleotide
  X-linked inhibitor of apoptosis (XIAP) siRNA
cttcaaagtagacaaatggcgcc

SEQ ID NO: 17735 - DNA, 23 bp, Artificial Sequence
  Description of Artificial Sequence: Synthetic oligonucleotide
  X-linked inhibitor of apoptosis (XIAP) siRNA
ttcaaagtagacaaatggcgccg

SEQ ID NO: 17736 - DNA, 23 bp, Artificial Sequence
  Description of Artificial Sequence: Synthetic oligonucleotide
  X-linked inhibitor of apoptosis (XIAP) siRNA
tcaaagtagacaaatggcgccgg

SEQ ID NO: 17737 - DNA, 23 bp, Artificial Sequence
  Description of Artificial Sequence: Synthetic oligonucleotide
  X-linked inhibitor of apoptosis (XIAP) siRNA
cgccgggcacggtggctcacgcc

SEQ ID NO: 17738 - DNA, 23 bp, Artificial Sequence
  Description of Artificial Sequence: Synthetic oligonucleotide
  X-linked inhibitor of apoptosis (XIAP) siRNA
gccgggcacggtggctcacgcct

SEQ ID NO: 17739 - DNA, 23 bp, Artificial Sequence
  Description of Artificial Sequence: Synthetic oligonucleotide
  X-linked inhibitor of apoptosis (XIAP) siRNA
ccgggcacggtggctcacgcctg

SEQ ID NO: 17740 - DNA, 23 bp, Artificial Sequence
  Description of Artificial Sequence: Synthetic oligonucleotide
  X-linked inhibitor of apoptosis (XIAP) siRNA
cgggcacggtggctcacgcctgt

SEQ ID NO: 17741 - DNA, 23 bp, Artificial Sequence
  Description of Artificial Sequence: Synthetic oligonucleotide
  X-linked inhibitor of apoptosis (XIAP) siRNA
gggcacggtggctcacgcctgta

SEQ ID NO: 17742 - DNA, 23 bp, Artificial Sequence
  Description of Artificial Sequence: Synthetic oligonucleotide
  X-linked inhibitor of apoptosis (XIAP) siRNA
ggcacggtggctcacgcctgtaa

SEQ ID NO: 17743 - DNA, 23 bp, Artificial Sequence
  Description of Artificial Sequence: Synthetic oligonucleotide
  X-linked inhibitor of apoptosis (XIAP) siRNA
gcacggtggctcacgcctgtaat

SEQ ID NO: 17744 - DNA, 23 bp, Artificial Sequence
  Description of Artificial Sequence: Synthetic oligonucleotide
  X-linked inhibitor of apoptosis (XIAP) siRNA
cacggtggctcacgcctgtaatc

SEQ ID NO: 17745 - DNA, 23 bp, Artificial Sequence
  Description of Artificial Sequence: Synthetic oligonucleotide
  X-linked inhibitor of apoptosis (XIAP) siRNA
acggtggctcacgcctgtaatcc

SEQ ID NO: 17746 - DNA, 23 bp, Artificial Sequence
  Description of Artificial Sequence: Synthetic oligonucleotide
  X-linked inhibitor of apoptosis (XIAP) siRNA
cggtggctcacgcctgtaatccc

SEQ ID NO: 17747 - DNA, 23 bp, Artificial Sequence
  Description of Artificial Sequence: Synthetic oligonucleotide
  X-linked inhibitor of apoptosis (XIAP) siRNA
ggtggctcacgcctgtaatccca

SEQ ID NO: 17748 - DNA, 23 bp, Artificial Sequence
  Description of Artificial Sequence: Synthetic oligonucleotide
  X-linked inhibitor of apoptosis (XIAP) siRNA
gtggctcacgcctgtaatcccag

SEQ ID NO: 17749 - DNA, 23 bp, Artificial Sequence
  Description of Artificial Sequence: Synthetic oligonucleotide
  X-linked inhibitor of apoptosis (XIAP) siRNA
tggctcacgcctgtaatcccagc

SEQ ID NO: 17750 - DNA, 23 bp, Artificial Sequence
  Description of Artificial Sequence: Synthetic oligonucleotide
  X-linked inhibitor of apoptosis (XIAP) siRNA
ggctcacgcctgtaatcccagca

SEQ ID NO: 17751 - DNA, 23 bp, Artificial Sequence
  Description of Artificial Sequence: Synthetic oligonucleotide
  X-linked inhibitor of apoptosis (XIAP) siRNA
gctcacgcctgtaatcccagcag

SEQ ID NO: 17752 - DNA, 23 bp, Artificial Sequence
  Description of Artificial Sequence: Synthetic oligonucleotide
  X-linked inhibitor of apoptosis (XIAP) siRNA
ctcacgcctgtaatcccagcagt

SEQ ID NO: 17753 - DNA, 23 bp, Artificial Sequence
  Description of Artificial Sequence: Synthetic oligonucleotide
  X-linked inhibitor of apoptosis (XIAP) siRNA
tcacgcctgtaatcccagcagtt

SEQ ID NO: 17754 - DNA, 23 bp, Artificial Sequence
  Description of Artificial Sequence: Synthetic oligonucleotide
  X-linked inhibitor of apoptosis (XIAP) siRNA
cacgcctgtaatcccagcagttt

SEQ ID NO: 17755 - DNA, 23 bp, Artificial Sequence
  Description of Artificial Sequence: Synthetic oligonucleotide
  X-linked inhibitor of apoptosis (XIAP) siRNA
acgcctgtaatcccagcagtttc

SEQ ID NO: 17756 - DNA, 23 bp, Artificial Sequence
  Description of Artificial Sequence: Synthetic oligonucleotide
  X-linked inhibitor of apoptosis (XIAP) siRNA
cgcctgtaatcccagcagtttcc

SEQ ID NO: 17757 - DNA, 23 bp, Artificial Sequence
  Description of Artificial Sequence: Synthetic oligonucleotide
  X-linked inhibitor of apoptosis (XIAP) siRNA
gcctgtaatcccagcagtttccg

SEQ ID NO: 17758 - DNA, 23 bp, Artificial Sequence
  Description of Artificial Sequence: Synthetic oligonucleotide
  X-linked inhibitor of apoptosis (XIAP) siRNA
cctgtaatcccagcagtttccga

SEQ ID NO: 17759 - DNA, 23 bp, Artificial Sequence
  Description of Artificial Sequence: Synthetic oligonucleotide
  X-linked inhibitor of apoptosis (XIAP) siRNA
ctgtaatcccagcagtttccgag

SEQ ID NO: 17760 - DNA, 23 bp, Artificial Sequence
  Description of Artificial Sequence: Synthetic oligonucleotide
  X-linked inhibitor of apoptosis (XIAP) siRNA
tgtaatcccagcagtttccgagg

SEQ ID NO: 17761 - DNA, 23 bp, Artificial Sequence
  Description of Artificial Sequence: Synthetic oligonucleotide
  X-linked inhibitor of apoptosis (XIAP) siRNA
gtaatcccagcagtttccgaggc

SEQ ID NO: 17762 - DNA, 23 bp, Artificial Sequence
  Description of Artificial Sequence: Synthetic oligonucleotide
  X-linked inhibitor of apoptosis (XIAP) siRNA
taatcccagcagtttccgaggct

SEQ ID NO: 17763 - DNA, 23 bp, Artificial Sequence
  Description of Artificial Sequence: Synthetic oligonucleotide
  X-linked inhibitor of apoptosis (XIAP) siRNA
aatcccagcagtttccgaggctg

SEQ ID NO: 17764 - DNA, 23 bp, Artificial Sequence
  Description of Artificial Sequence: Synthetic oligonucleotide
  X-linked inhibitor of apoptosis (XIAP) siRNA
atcccagcagtttccgaggctga

SEQ ID NO: 17765 - DNA, 23 bp, Artificial Sequence
  Description of Artificial Sequence: Synthetic oligonucleotide
  X-linked inhibitor of apoptosis (XIAP) siRNA
tcccagcagtttccgaggctgag

SEQ ID NO: 17766 - DNA, 23 bp, Artificial Sequence
  Description of Artificial Sequence: Synthetic oligonucleotide
  X-linked inhibitor of apoptosis (XIAP) siRNA
cccagcagtttccgaggctgagg

SEQ ID NO: 17767 - DNA, 23 bp, Artificial Sequence
  Description of Artificial Sequence: Synthetic oligonucleotide
  X-linked inhibitor of apoptosis (XIAP) siRNA
ccagcagtttccgaggctgaggc

SEQ ID NO: 17768 - DNA, 23 bp, Artificial Sequence
  Description of Artificial Sequence: Synthetic oligonucleotide
  X-linked inhibitor of apoptosis (XIAP) siRNA
cagcagtttccgaggctgaggca

SEQ ID NO: 17769 - DNA, 23 bp, Artificial Sequence
  Description of Artificial Sequence: Synthetic oligonucleotide
  X-linked inhibitor of apoptosis (XIAP) siRNA
agcagtttccgaggctgaggcag

SEQ ID NO: 17770 - DNA, 23 bp, Artificial Sequence
  Description of Artificial Sequence: Synthetic oligonucleotide
  X-linked inhibitor of apoptosis (XIAP) siRNA
gcagtttccgaggctgaggcagg

SEQ ID NO: 17771 - DNA, 23 bp, Artificial Sequence
  Description of Artificial Sequence: Synthetic oligonucleotide
  X-linked inhibitor of apoptosis (XIAP) siRNA
cagtttccgaggctgaggcaggc

SEQ ID NO: 17772 - DNA, 23 bp, Artificial Sequence
  Description of Artificial Sequence: Synthetic oligonucleotide
  X-linked inhibitor of apoptosis (XIAP) siRNA
agtttccgaggctgaggcaggcg

SEQ ID NO: 17773 - DNA, 23 bp, Artificial Sequence
  Description of Artificial Sequence: Synthetic oligonucleotide
  X-linked inhibitor of apoptosis (XIAP) siRNA
gtttccgaggctgaggcaggcgg

SEQ ID NO: 17774 - DNA, 23 bp, Artificial Sequence
  Description of Artificial Sequence: Synthetic oligonucleotide
  X-linked inhibitor of apoptosis (XIAP) siRNA
tttccgaggctgaggcaggcggc

SEQ ID NO: 17775 - DNA, 23 bp, Artificial Sequence
  Description of Artificial Sequence: Synthetic oligonucleotide
  X-linked inhibitor of apoptosis (XIAP) siRNA
ttccgaggctgaggcaggcggct

SEQ ID NO: 17776 - DNA, 23 bp, Artificial Sequence
  Description of Artificial Sequence: Synthetic oligonucleotide
  X-linked inhibitor of apoptosis (XIAP) siRNA
tccgaggctgaggcaggcggctc

SEQ ID NO: 17777 - DNA, 23 bp, Artificial Sequence
  Description of Artificial Sequence: Synthetic oligonucleotide
  X-linked inhibitor of apoptosis (XIAP) siRNA
ccgaggctgaggcaggcggctca

SEQ ID NO: 17778 - DNA, 23 bp, Artificial Sequence
  Description of Artificial Sequence: Synthetic oligonucleotide
  X-linked inhibitor of apoptosis (XIAP) siRNA
cgaggctgaggcaggcggctcac

SEQ ID NO: 17779 - DNA, 23 bp, Artificial Sequence
  Description of Artificial Sequence: Synthetic oligonucleotide
  X-linked inhibitor of apoptosis (XIAP) siRNA
gaggctgaggcaggcggctcacc

SEQ ID NO: 17780 - DNA, 23 bp, Artificial Sequence
  Description of Artificial Sequence: Synthetic oligonucleotide
  X-linked inhibitor of apoptosis (XIAP) siRNA
aggctgaggcaggcggctcacct

SEQ ID NO: 17781 - DNA, 23 bp, Artificial Sequence
  Description of Artificial Sequence: Synthetic oligonucleotide
  X-linked inhibitor of apoptosis (XIAP) siRNA
ggctgaggcaggcggctcacctg

SEQ ID NO: 17782 - DNA, 23 bp, Artificial Sequence
  Description of Artificial Sequence: Synthetic oligonucleotide
  X-linked inhibitor of apoptosis (XIAP) siRNA
gctgaggcaggcggctcacctga

SEQ ID NO: 17783 - DNA, 23 bp, Artificial Sequence
  Description of Artificial Sequence: Synthetic oligonucleotide
  X-linked inhibitor of apoptosis (XIAP) siRNA
ctgaggcaggcggctcacctgag

SEQ ID NO: 17784 - DNA, 23 bp, Artificial Sequence
  Description of Artificial Sequence: Synthetic oligonucleotide
  X-linked inhibitor of apoptosis (XIAP) siRNA
tgaggcaggcggctcacctgagg

SEQ ID NO: 17785 - DNA, 23 bp, Artificial Sequence
  Description of Artificial Sequence: Synthetic oligonucleotide
  X-linked inhibitor of apoptosis (XIAP) siRNA
gaggcaggcggctcacctgaggt

SEQ ID NO: 17786 - DNA, 23 bp, Artificial Sequence
  Description of Artificial Sequence: Synthetic oligonucleotide
  X-linked inhibitor of apoptosis (XIAP) siRNA
aggcaggcggctcacctgaggtc

SEQ ID NO: 17787 - DNA, 23 bp, Artificial Sequence
  Description of Artificial Sequence: Synthetic oligonucleotide
  X-linked inhibitor of apoptosis (XIAP) siRNA
ggcaggcggctcacctgaggtca

SEQ ID NO: 17788 - DNA, 23 bp, Artificial Sequence
  Description of Artificial Sequence: Synthetic oligonucleotide
  X-linked inhibitor of apoptosis (XIAP) siRNA
gcaggcggctcacctgaggtcag

SEQ ID NO: 17789 - DNA, 23 bp, Artificial Sequence
  Description of Artificial Sequence: Synthetic oligonucleotide
  X-linked inhibitor of apoptosis (XIAP) siRNA
caggcggctcacctgaggtcagg

SEQ ID NO: 17790 - DNA, 23 bp, Artificial Sequence
  Description of Artificial Sequence: Synthetic oligonucleotide
  X-linked inhibitor of apoptosis (XIAP) siRNA
aggcggctcacctgaggtcagga

SEQ ID NO: 17791 - DNA, 23 bp, Artificial Sequence
  Description of Artificial Sequence: Synthetic oligonucleotide
  X-linked inhibitor of apoptosis (XIAP) siRNA
ggcggctcacctgaggtcaggag

SEQ ID NO: 17792 - DNA, 23 bp, Artificial Sequence
  Description of Artificial Sequence: Synthetic oligonucleotide
  X-linked inhibitor of apoptosis (XIAP) siRNA
gcggctcacctgaggtcaggagt

SEQ ID NO: 17793 - DNA, 23 bp, Artificial Sequence
  Description of Artificial Sequence: Synthetic oligonucleotide
  X-linked inhibitor of apoptosis (XIAP) siRNA
cggctcacctgaggtcaggagtt

SEQ ID NO: 17794 - DNA, 23 bp, Artificial Sequence
  Description of Artificial Sequence: Synthetic oligonucleotide
  X-linked inhibitor of apoptosis (XIAP) siRNA
ggctcacctgaggtcaggagttg

SEQ ID NO: 17795 - DNA, 23 bp, Artificial Sequence
  Description of Artificial Sequence: Synthetic oligonucleotide
  X-linked inhibitor of apoptosis (XIAP) siRNA
gctcacctgaggtcaggagttgg

SEQ ID NO: 17796 - DNA, 23 bp, Artificial Sequence
  Description of Artificial Sequence: Synthetic oligonucleotide
  X-linked inhibitor of apoptosis (XIAP) siRNA
ctcacctgaggtcaggagttgga

SEQ ID NO: 17797 - DNA, 23 bp, Artificial Sequence
  Description of Artificial Sequence: Synthetic oligonucleotide
  X-linked inhibitor of apoptosis (XIAP) siRNA
tcacctgaggtcaggagttggag

SEQ ID NO: 17798 - DNA, 23 bp, Artificial Sequence
  Description of Artificial Sequence: Synthetic oligonucleotide
  X-linked inhibitor of apoptosis (XIAP) siRNA
cacctgaggtcaggagttggaga

SEQ ID NO: 17799 - DNA, 23 bp, Artificial Sequence
  Description of Artificial Sequence: Synthetic oligonucleotide
  X-linked inhibitor of apoptosis (XIAP) siRNA
acctgaggtcaggagttggagac

SEQ ID NO: 17800 - DNA, 23 bp, Artificial Sequence
  Description of Artificial Sequence: Synthetic oligonucleotide
  X-linked inhibitor of apoptosis (XIAP) siRNA
cctgaggtcaggagttggagacc

SEQ ID NO: 17801 - DNA, 23 bp, Artificial Sequence
  Description of Artificial Sequence: Synthetic oligonucleotide
  X-linked inhibitor of apoptosis (XIAP) siRNA
ctgaggtcaggagttggagacca

SEQ ID NO: 17802 - DNA, 23 bp, Artificial Sequence
  Description of Artificial Sequence: Synthetic oligonucleotide
  X-linked inhibitor of apoptosis (XIAP) siRNA
tgaggtcaggagttggagaccag

SEQ ID NO: 17803 - DNA, 23 bp, Artificial Sequence
  Description of Artificial Sequence: Synthetic oligonucleotide
  X-linked inhibitor of apoptosis (XIAP) siRNA
gaggtcaggagttggagaccagc

SEQ ID NO: 17804 - DNA, 23 bp, Artificial Sequence
  Description of Artificial Sequence: Synthetic oligonucleotide
  X-linked inhibitor of apoptosis (XIAP) siRNA
aggtcaggagttggagaccagcc

SEQ ID NO: 17805 - DNA, 23 bp, Artificial Sequence
  Description of Artificial Sequence: Synthetic oligonucleotide
  X-linked inhibitor of apoptosis (XIAP) siRNA
ggtcaggagttggagaccagcct

SEQ ID NO: 17806 - DNA, 23 bp, Artificial Sequence
  Description of Artificial Sequence: Synthetic oligonucleotide
  X-linked inhibitor of apoptosis (XIAP) siRNA
gtcaggagttggagaccagcctg

SEQ ID NO: 17807 - DNA, 23 bp, Artificial Sequence
  Description of Artificial Sequence: Synthetic oligonucleotide
  X-linked inhibitor of apoptosis (XIAP) siRNA
tcaggagttggagaccagcctgg

SEQ ID NO: 17808 - DNA, 23 bp, Artificial Sequence
  Description of Artificial Sequence: Synthetic oligonucleotide
  X-linked inhibitor of apoptosis (XIAP) siRNA
caggagttggagaccagcctggc

SEQ ID NO: 17809 - DNA, 23 bp, Artificial Sequence
  Description of Artificial Sequence: Synthetic oligonucleotide
  X-linked inhibitor of apoptosis (XIAP) siRNA
aggagttggagaccagcctggcc

SEQ ID NO: 17810 - DNA, 23 bp, Artificial Sequence
  Description of Artificial Sequence: Synthetic oligonucleotide
  X-linked inhibitor of apoptosis (XIAP) siRNA
ggagttggagaccagcctggcca

SEQ ID NO: 17811 - DNA, 23 bp, Artificial Sequence
  Description of Artificial Sequence: Synthetic oligonucleotide
  X-linked inhibitor of apoptosis (XIAP) siRNA
gagttggagaccagcctggccaa

SEQ ID NO: 17812 - DNA, 23 bp, Artificial Sequence
  Description of Artificial Sequence: Synthetic oligonucleotide
  X-linked inhibitor of apoptosis (XIAP) siRNA
agttggagaccagcctggccaac

SEQ ID NO: 17813 - DNA, 23 bp, Artificial Sequence
  Description of Artificial Sequence: Synthetic oligonucleotide
  X-linked inhibitor of apoptosis (XIAP) siRNA
gttggagaccagcctggccaaca

SEQ ID NO: 17814 - DNA, 23 bp, Artificial Sequence
  Description of Artificial Sequence: Synthetic oligonucleotide
  X-linked inhibitor of apoptosis (XIAP) siRNA
ttggagaccagcctggccaacat

SEQ ID NO: 17815 - DNA, 23 bp, Artificial Sequence
  Description of Artificial Sequence: Synthetic oligonucleotide
  X-linked inhibitor of apoptosis (XIAP) siRNA
tggagaccagcctggccaacatg

SEQ ID NO: 17816 - DNA, 23 bp, Artificial Sequence
  Description of Artificial Sequence: Synthetic oligonucleotide
  X-linked inhibitor of apoptosis (XIAP) siRNA
ggagaccagcctggccaacatgc

SEQ ID NO: 17817 - DNA, 23 bp, Artificial Sequence
  Description of Artificial Sequence: Synthetic oligonucleotide
  X-linked inhibitor of apoptosis (XIAP) siRNA
gagaccagcctggccaacatgct

SEQ ID NO: 17818 - DNA, 23 bp, Artificial Sequence
  Description of Artificial Sequence: Synthetic oligonucleotide
  X-linked inhibitor of apoptosis (XIAP) siRNA
agaccagcctggccaacatgctg

SEQ ID NO: 17819 - DNA, 23 bp, Artificial Sequence
  Description of Artificial Sequence: Synthetic oligonucleotide
  X-linked inhibitor of apoptosis (XIAP) siRNA
gaccagcctggccaacatgctga

SEQ ID NO: 17820 - DNA, 23 bp, Artificial Sequence
  Description of Artificial Sequence: Synthetic oligonucleotide
  X-linked inhibitor of apoptosis (XIAP) siRNA
accagcctggccaacatgctgaa

SEQ ID NO: 17821 - DNA, 23 bp, Artificial Sequence
  Description of Artificial Sequence: Synthetic oligonucleotide
  X-linked inhibitor of apoptosis (XIAP) siRNA
ccagcctggccaacatgctgaaa

SEQ ID NO: 17822 - DNA, 23 bp, Artificial Sequence
  Description of Artificial Sequence: Synthetic oligonucleotide
  X-linked inhibitor of apoptosis (XIAP) siRNA
cagcctggccaacatgctgaaac

SEQ ID NO: 17823 - DNA, 23 bp, Artificial Sequence
  Description of Artificial Sequence: Synthetic oligonucleotide
  X-linked inhibitor of apoptosis (XIAP) siRNA
agcctggccaacatgctgaaacc

SEQ ID NO: 17824 - DNA, 23 bp, Artificial Sequence
  Description of Artificial Sequence: Synthetic oligonucleotide
  X-linked inhibitor of apoptosis (XIAP) siRNA
gcctggccaacatgctgaaaccc

SEQ ID NO: 17825 - DNA, 23 bp, Artificial Sequence
  Description of Artificial Sequence: Synthetic oligonucleotide
  X-linked inhibitor of apoptosis (XIAP) siRNA
cctggccaacatgctgaaaccct

SEQ ID NO: 17826 - DNA, 23 bp, Artificial Sequence
  Description of Artificial Sequence: Synthetic oligonucleotide
  X-linked inhibitor of apoptosis (XIAP) siRNA
ctggccaacatgctgaaaccctg

SEQ ID NO: 17827 - DNA, 23 bp, Artificial Sequence
  Description of Artificial Sequence: Synthetic oligonucleotide
  X-linked inhibitor of apoptosis (XIAP) siRNA
tggccaacatgctgaaaccctgt

SEQ ID NO: 17828 - DNA, 23 bp, Artificial Sequence
  Description of Artificial Sequence: Synthetic oligonucleotide
  X-linked inhibitor of apoptosis (XIAP) siRNA
ggccaacatgctgaaaccctgtc

SEQ ID NO: 17829 - DNA, 23 bp, Artificial Sequence
  Description of Artificial Sequence: Synthetic oligonucleotide
  X-linked inhibitor of apoptosis (XIAP) siRNA
gccaacatgctgaaaccctgtct

SEQ ID NO: 17830 - DNA, 23 bp, Artificial Sequence
  Description of Artificial Sequence: Synthetic oligonucleotide
  X-linked inhibitor of apoptosis (XIAP) siRNA
ccaacatgctgaaaccctgtctg

SEQ ID NO: 17831 - DNA, 23 bp, Artificial Sequence
  Description of Artificial Sequence: Synthetic oligonucleotide
  X-linked inhibitor of apoptosis (XIAP) siRNA
caacatgctgaaaccctgtctgt

SEQ ID NO: 17832 - DNA, 23 bp, Artificial Sequence
  Description of Artificial Sequence: Synthetic oligonucleotide
  X-linked inhibitor of apoptosis (XIAP) siRNA
aacatgctgaaaccctgtctgta

SEQ ID NO: 17833 - DNA, 23 bp, Artificial Sequence
  Description of Artificial Sequence: Synthetic oligonucleotide
  X-linked inhibitor of apoptosis (XIAP) siRNA
acatgctgaaaccctgtctgtac

SEQ ID NO: 17834 - DNA, 23 bp, Artificial Sequence
  Description of Artificial Sequence: Synthetic oligonucleotide
  X-linked inhibitor of apoptosis (XIAP) siRNA
catgctgaaaccctgtctgtaca

SEQ ID NO: 17835 - DNA, 23 bp, Artificial Sequence
  Description of Artificial Sequence: Synthetic oligonucleotide
  X-linked inhibitor of apoptosis (XIAP) siRNA
atgctgaaaccctgtctgtacaa

SEQ ID NO: 17836 - DNA, 23 bp, Artificial Sequence
  Description of Artificial Sequence: Synthetic oligonucleotide
  X-linked inhibitor of apoptosis (XIAP) siRNA
tgctgaaaccctgtctgtacaaa

SEQ ID NO: 17837 - DNA, 23 bp, Artificial Sequence
  Description of Artificial Sequence: Synthetic oligonucleotide
  X-linked inhibitor of apoptosis (XIAP) siRNA
gctgaaaccctgtctgtacaaaa

SEQ ID NO: 17838 - DNA, 23 bp, Artificial Sequence
  Description of Artificial Sequence: Synthetic oligonucleotide
  X-linked inhibitor of apoptosis (XIAP) siRNA
ctgaaaccctgtctgtacaaaaa

SEQ ID NO: 17839 - DNA, 23 bp, Artificial Sequence
  Description of Artificial Sequence: Synthetic oligonucleotide
  X-linked inhibitor of apoptosis (XIAP) siRNA
tgaaaccctgtctgtacaaaaat

SEQ ID NO: 17840 - DNA, 23 bp, Artificial Sequence
  Description of Artificial Sequence: Synthetic oligonucleotide
  X-linked inhibitor of apoptosis (XIAP) siRNA
gaaaccctgtctgtacaaaaata

SEQ ID NO: 17841 - DNA, 23 bp, Artificial Sequence
  Description of Artificial Sequence: Synthetic oligonucleotide
  X-linked inhibitor of apoptosis (XIAP) siRNA
aaaccctgtctgtacaaaaatac

SEQ ID NO: 17842 - DNA, 23 bp, Artificial Sequence
  Description of Artificial Sequence: Synthetic oligonucleotide
  X-linked inhibitor of apoptosis (XIAP) siRNA
aaccctgtctgtacaaaaataca

SEQ ID NO: 17843 - DNA, 23 bp, Artificial Sequence
  Description of Artificial Sequence: Synthetic oligonucleotide
  X-linked inhibitor of apoptosis (XIAP) siRNA
accctgtctgtacaaaaatacaa

SEQ ID NO: 17844 - DNA, 23 bp, Artificial Sequence
  Description of Artificial Sequence: Synthetic oligonucleotide
  X-linked inhibitor of apoptosis (XIAP) siRNA
ccctgtctgtacaaaaatacaaa

SEQ ID NO: 17845 - DNA, 23 bp, Artificial Sequence
  Description of Artificial Sequence: Synthetic oligonucleotide
  X-linked inhibitor of apoptosis (XIAP) siRNA
cctgtctgtacaaaaatacaaaa

SEQ ID NO: 17846 - DNA, 23 bp, Artificial Sequence
  Description of Artificial Sequence: Synthetic oligonucleotide
  X-linked inhibitor of apoptosis (XIAP) siRNA
ctgtctgtacaaaaatacaaaaa

SEQ ID NO: 17847 - DNA, 23 bp, Artificial Sequence
  Description of Artificial Sequence: Synthetic oligonucleotide
  X-linked inhibitor of apoptosis (XIAP) siRNA
tgtctgtacaaaaatacaaaaat

SEQ ID NO: 17848 - DNA, 23 bp, Artificial Sequence
  Description of Artificial Sequence: Synthetic oligonucleotide
  X-linked inhibitor of apoptosis (XIAP) siRNA
gtctgtacaaaaatacaaaaata

SEQ ID NO: 17849 - DNA, 23 bp, Artificial Sequence
  Description of Artificial Sequence: Synthetic oligonucleotide
  X-linked inhibitor of apoptosis (XIAP) siRNA
tctgtacaaaaatacaaaaatag

SEQ ID NO: 17850 - DNA, 23 bp, Artificial Sequence
  Description of Artificial Sequence: Synthetic oligonucleotide
  X-linked inhibitor of apoptosis (XIAP) siRNA
ctgtacaaaaatacaaaaatagc

SEQ ID NO: 17851 - DNA, 23 bp, Artificial Sequence
  Description of Artificial Sequence: Synthetic oligonucleotide
  X-linked inhibitor of apoptosis (XIAP) siRNA
tgtacaaaaatacaaaaatagct

SEQ ID NO: 17852 - DNA, 23 bp, Artificial Sequence
  Description of Artificial Sequence: Synthetic oligonucleotide
  X-linked inhibitor of apoptosis (XIAP) siRNA
gtacaaaaatacaaaaatagctg

SEQ ID NO: 17853 - DNA, 23 bp, Artificial Sequence
  Description of Artificial Sequence: Synthetic oligonucleotide
  X-linked inhibitor of apoptosis (XIAP) siRNA
tacaaaaatacaaaaatagctgg

SEQ ID NO: 17854 - DNA, 23 bp, Artificial Sequence
  Description of Artificial Sequence: Synthetic oligonucleotide
  X-linked inhibitor of apoptosis (XIAP) siRNA
acaaaaatacaaaaatagctggg

SEQ ID NO: 17855 - DNA, 23 bp, Artificial Sequence
  Description of Artificial Sequence: Synthetic oligonucleotide
  X-linked inhibitor of apoptosis (XIAP) siRNA
caaaaatacaaaaatagctgggc

SEQ ID NO: 17856 - DNA, 23 bp, Artificial Sequence
  Description of Artificial Sequence: Synthetic oligonucleotide
  X-linked inhibitor of apoptosis (XIAP) siRNA
aaaaatacaaaaatagctgggca

SEQ ID NO: 17857 - DNA, 23 bp, Artificial Sequence
  Description of Artificial Sequence: Synthetic oligonucleotide
  X-linked inhibitor of apoptosis (XIAP) siRNA
aaaatacaaaaatagctgggcat

SEQ ID NO: 17858 - DNA, 23 bp, Artificial Sequence
  Description of Artificial Sequence: Synthetic oligonucleotide
  X-linked inhibitor of apoptosis (XIAP) siRNA
aaatacaaaaatagctgggcatg

SEQ ID NO: 17859 - DNA, 23 bp, Artificial Sequence
  Description of Artificial Sequence: Synthetic oligonucleotide
  X-linked inhibitor of apoptosis (XIAP) siRNA
aatacaaaaatagctgggcatgg

SEQ ID NO: 17860 - DNA, 23 bp, Artificial Sequence
  Description of Artificial Sequence: Synthetic oligonucleotide
  X-linked inhibitor of apoptosis (XIAP) siRNA
atacaaaaatagctgggcatggt

SEQ ID NO: 17861 - DNA, 23 bp, Artificial Sequence
  Description of Artificial Sequence: Synthetic oligonucleotide
  X-linked inhibitor of apoptosis (XIAP) siRNA
tacaaaaatagctgggcatggtg

SEQ ID NO: 17862 - DNA, 23 bp, Artificial Sequence
  Description of Artificial Sequence: Synthetic oligonucleotide
  X-linked inhibitor of apoptosis (XIAP) siRNA
acaaaaatagctgggcatggtgg

SEQ ID NO: 17863 - DNA, 23 bp, Artificial Sequence
  Description of Artificial Sequence: Synthetic oligonucleotide
  X-linked inhibitor of apoptosis (XIAP) siRNA
caaaaatagctgggcatggtggc

SEQ ID NO: 17864 - DNA, 23 bp, Artificial Sequence
  Description of Artificial Sequence: Synthetic oligonucleotide
  X-linked inhibitor of apoptosis (XIAP) siRNA
aaaaatagctgggcatggtggcg

SEQ ID NO: 17865 - DNA, 23 bp, Artificial Sequence
  Description of Artificial Sequence: Synthetic oligonucleotide
  X-linked inhibitor of apoptosis (XIAP) siRNA
aaaatagctgggcatggtggcgc

SEQ ID NO: 17866 - DNA, 23 bp, Artificial Sequence
  Description of Artificial Sequence: Synthetic oligonucleotide
  X-linked inhibitor of apoptosis (XIAP) siRNA
aaatagctgggcatggtggcgca

SEQ ID NO: 17867 - DNA, 23 bp, Artificial Sequence
  Description of Artificial Sequence: Synthetic oligonucleotide
  X-linked inhibitor of apoptosis (XIAP) siRNA
aatagctgggcatggtggcgcat

SEQ ID NO: 17868 - DNA, 23 bp, Artificial Sequence
  Description of Artificial Sequence: Synthetic oligonucleotide
  X-linked inhibitor of apoptosis (XIAP) siRNA
atagctgggcatggtggcgcatg

SEQ ID NO: 17869 - DNA, 23 bp, Artificial Sequence
  Description of Artificial Sequence: Synthetic oligonucleotide
  X-linked inhibitor of apoptosis (XIAP) siRNA
tagctgggcatggtggcgcatgc

SEQ ID NO: 17870 - DNA, 23 bp, Artificial Sequence
  Description of Artificial Sequence: Synthetic oligonucleotide
  X-linked inhibitor of apoptosis (XIAP) siRNA
agctgggcatggtggcgcatgcc

SEQ ID NO: 17871 - DNA, 23 bp, Artificial Sequence
  Description of Artificial Sequence: Synthetic oligonucleotide
  X-linked inhibitor of apoptosis (XIAP) siRNA
gctgggcatggtggcgcatgcct

SEQ ID NO: 17872 - DNA, 23 bp, Artificial Sequence
  Description of Artificial Sequence: Synthetic oligonucleotide
  X-linked inhibitor of apoptosis (XIAP) siRNA
ctgggcatggtggcgcatgcctg

SEQ ID NO: 17873 - DNA, 23 bp, Artificial Sequence
  Description of Artificial Sequence: Synthetic oligonucleotide
  X-linked inhibitor of apoptosis (XIAP) siRNA
tgggcatggtggcgcatgcctgt

SEQ ID NO: 17874 - DNA, 23 bp, Artificial Sequence
  Description of Artificial Sequence: Synthetic oligonucleotide
  X-linked inhibitor of apoptosis (XIAP) siRNA
gggcatggtggcgcatgcctgta

SEQ ID NO: 17875 - DNA, 23 bp, Artificial Sequence
  Description of Artificial Sequence: Synthetic oligonucleotide
  X-linked inhibitor of apoptosis (XIAP) siRNA
ggcatggtggcgcatgcctgtag

SEQ ID NO: 17876 - DNA, 23 bp, Artificial Sequence
  Description of Artificial Sequence: Synthetic oligonucleotide
  X-linked inhibitor of apoptosis (XIAP) siRNA
gcatggtggcgcatgcctgtagt

SEQ ID NO: 17877 - DNA, 23 bp, Artificial Sequence
  Description of Artificial Sequence: Synthetic oligonucleotide
  X-linked inhibitor of apoptosis (XIAP) siRNA
catggtggcgcatgcctgtagtc

SEQ ID NO: 17878 - DNA, 23 bp, Artificial Sequence
  Description of Artificial Sequence: Synthetic oligonucleotide
  X-linked inhibitor of apoptosis (XIAP) siRNA
atggtggcgcatgcctgtagtcc

SEQ ID NO: 17879 - DNA, 23 bp, Artificial Sequence
  Description of Artificial Sequence: Synthetic oligonucleotide
  X-linked inhibitor of apoptosis (XIAP) siRNA
tggtggcgcatgcctgtagtccc

SEQ ID NO: 17880 - DNA, 23 bp, Artificial Sequence
  Description of Artificial Sequence: Synthetic oligonucleotide
  X-linked inhibitor of apoptosis (XIAP) siRNA
ggtggcgcatgcctgtagtccca

SEQ ID NO: 17881 - DNA, 23 bp, Artificial Sequence
  Description of Artificial Sequence: Synthetic oligonucleotide
  X-linked inhibitor of apoptosis (XIAP) siRNA
gtggcgcatgcctgtagtcccag

SEQ ID NO: 17882 - DNA, 23 bp, Artificial Sequence
  Description of Artificial Sequence: Synthetic oligonucleotide
  X-linked inhibitor of apoptosis (XIAP) siRNA
tggcgcatgcctgtagtcccagc

SEQ ID NO: 17883 - DNA, 23 bp, Artificial Sequence
  Description of Artificial Sequence: Synthetic oligonucleotide
  X-linked inhibitor of apoptosis (XIAP) siRNA
ggcgcatgcctgtagtcccagct

SEQ ID NO: 17884 - DNA, 23 bp, Artificial Sequence
  Description of Artificial Sequence: Synthetic oligonucleotide
  X-linked inhibitor of apoptosis (XIAP) siRNA
gcgcatgcctgtagtcccagcta

SEQ ID NO: 17885 - DNA, 23 bp, Artificial Sequence
  Description of Artificial Sequence: Synthetic oligonucleotide
  X-linked inhibitor of apoptosis (XIAP) siRNA
cgcatgcctgtagtcccagctac

SEQ ID NO: 17886 - DNA, 23 bp, Artificial Sequence
  Description of Artificial Sequence: Synthetic oligonucleotide
  X-linked inhibitor of apoptosis (XIAP) siRNA
gcatgcctgtagtcccagctact

SEQ ID NO: 17887 - DNA, 23 bp, Artificial Sequence
  Description of Artificial Sequence: Synthetic oligonucleotide
  X-linked inhibitor of apoptosis (XIAP) siRNA
catgcctgtagtcccagctacta

SEQ ID NO: 17888 - DNA, 23 bp, Artificial Sequence
  Description of Artificial Sequence: Synthetic oligonucleotide
  X-linked inhibitor of apoptosis (XIAP) siRNA
atgcctgtagtcccagctactag

SEQ ID NO: 17889 - DNA, 23 bp, Artificial Sequence
  Description of Artificial Sequence: Synthetic oligonucleotide
  X-linked inhibitor of apoptosis (XIAP) siRNA
tgcctgtagtcccagctactaga

SEQ ID NO: 17890 - DNA, 23 bp, Artificial Sequence
  Description of Artificial Sequence: Synthetic oligonucleotide
  X-linked inhibitor of apoptosis (XIAP) siRNA
gcctgtagtcccagctactagag

SEQ ID NO: 17891 - DNA, 23 bp, Artificial Sequence
  Description of Artificial Sequence: Synthetic oligonucleotide
  X-linked inhibitor of apoptosis (XIAP) siRNA
cctgtagtcccagctactagagc

SEQ ID NO: 17892 - DNA, 23 bp, Artificial Sequence
  Description of Artificial Sequence: Synthetic oligonucleotide
  X-linked inhibitor of apoptosis (XIAP) siRNA
ctgtagtcccagctactagagcg

SEQ ID NO: 17893 - DNA, 23 bp, Artificial Sequence
  Description of Artificial Sequence: Synthetic oligonucleotide
  X-linked inhibitor of apoptosis (XIAP) siRNA
tgtagtcccagctactagagcga

SEQ ID NO: 17894 - DNA, 23 bp, Artificial Sequence
  Description of Artificial Sequence: Synthetic oligonucleotide
  X-linked inhibitor of apoptosis (XIAP) siRNA
gtagtcccagctactagagcgac

SEQ ID NO: 17895 - DNA, 23 bp, Artificial Sequence
  Description of Artificial Sequence: Synthetic oligonucleotide
  X-linked inhibitor of apoptosis (XIAP) siRNA
tagtcccagctactagagcgact

SEQ ID NO: 17896 - DNA, 23 bp, Artificial Sequence
  Description of Artificial Sequence: Synthetic oligonucleotide
  X-linked inhibitor of apoptosis (XIAP) siRNA
agtcccagctactagagcgactg

SEQ ID NO: 17897 - DNA, 23 bp, Artificial Sequence
  Description of Artificial Sequence: Synthetic oligonucleotide
  X-linked inhibitor of apoptosis (XIAP) siRNA
gtcccagctactagagcgactga

SEQ ID NO: 17898 - DNA, 23 bp, Artificial Sequence
  Description of Artificial Sequence: Synthetic oligonucleotide
  X-linked inhibitor of apoptosis (XIAP) siRNA
tcccagctactagagcgactgag

SEQ ID NO: 17899 - DNA, 23 bp, Artificial Sequence
  Description of Artificial Sequence: Synthetic oligonucleotide
  X-linked inhibitor of apoptosis (XIAP) siRNA
cccagctactagagcgactgagg

SEQ ID NO: 17900 - DNA, 23 bp, Artificial Sequence
  Description of Artificial Sequence: Synthetic oligonucleotide
  X-linked inhibitor of apoptosis (XIAP) siRNA
ccagctactagagcgactgaggc

SEQ ID NO: 17901 - DNA, 23 bp, Artificial Sequence
  Description of Artificial Sequence: Synthetic oligonucleotide
  X-linked inhibitor of apoptosis (XIAP) siRNA
cagctactagagcgactgaggca

SEQ ID NO: 17902 - DNA, 23 bp, Artificial Sequence
  Description of Artificial Sequence: Synthetic oligonucleotide
  X-linked inhibitor of apoptosis (XIAP) siRNA
agctactagagcgactgaggcag

SEQ ID NO: 17903 - DNA, 23 bp, Artificial Sequence
  Description of Artificial Sequence: Synthetic oligonucleotide
  X-linked inhibitor of apoptosis (XIAP) siRNA
gctactagagcgactgaggcagg

SEQ ID NO: 17904 - DNA, 23 bp, Artificial Sequence
  Description of Artificial Sequence: Synthetic oligonucleotide
  X-linked inhibitor of apoptosis (XIAP) siRNA
ctactagagcgactgaggcagga

SEQ ID NO: 17905 - DNA, 23 bp, Artificial Sequence
  Description of Artificial Sequence: Synthetic oligonucleotide
  X-linked inhibitor of apoptosis (XIAP) siRNA
tactagagcgactgaggcaggag

SEQ ID NO: 17906 - DNA, 23 bp, Artificial Sequence
  Description of Artificial Sequence: Synthetic oligonucleotide
  X-linked inhibitor of apoptosis (XIAP) siRNA
actagagcgactgaggcaggaga

SEQ ID NO: 17907 - DNA, 23 bp, Artificial Sequence
  Description of Artificial Sequence: Synthetic oligonucleotide
  X-linked inhibitor of apoptosis (XIAP) siRNA
ctagagcgactgaggcaggagaa

SEQ ID NO: 17908 - DNA, 23 bp, Artificial Sequence
  Description of Artificial Sequence: Synthetic oligonucleotide
  X-linked inhibitor of apoptosis (XIAP) siRNA
tagagcgactgaggcaggagaat

SEQ ID NO: 17909 - DNA, 23 bp, Artificial Sequence
  Description of Artificial Sequence: Synthetic oligonucleotide
  X-linked inhibitor of apoptosis (XIAP) siRNA
agagcgactgaggcaggagaatt

SEQ ID NO: 17910 - DNA, 23 bp, Artificial Sequence
  Description of Artificial Sequence: Synthetic oligonucleotide
  X-linked inhibitor of apoptosis (XIAP) siRNA
gagcgactgaggcaggagaattg

SEQ ID NO: 17911 - DNA, 23 bp, Artificial Sequence
  Description of Artificial Sequence: Synthetic oligonucleotide
  X-linked inhibitor of apoptosis (XIAP) siRNA
agcgactgaggcaggagaattgc

SEQ ID NO: 17912 - DNA, 23 bp, Artificial Sequence
  Description of Artificial Sequence: Synthetic oligonucleotide
  X-linked inhibitor of apoptosis (XIAP) siRNA
gcgactgaggcaggagaattgct

SEQ ID NO: 17913 - DNA, 23 bp, Artificial Sequence
  Description of Artificial Sequence: Synthetic oligonucleotide
  X-linked inhibitor of apoptosis (XIAP) siRNA
cgactgaggcaggagaattgctt

SEQ ID NO: 17914 - DNA, 23 bp, Artificial Sequence
  Description of Artificial Sequence: Synthetic oligonucleotide
  X-linked inhibitor of apoptosis (XIAP) siRNA
gactgaggcaggagaattgcttg

SEQ ID NO: 17915 - DNA, 23 bp, Artificial Sequence
  Description of Artificial Sequence: Synthetic oligonucleotide
  X-linked inhibitor of apoptosis (XIAP) siRNA
actgaggcaggagaattgcttga

SEQ ID NO: 17916 - DNA, 23 bp, Artificial Sequence
  Description of Artificial Sequence: Synthetic oligonucleotide
  X-linked inhibitor of apoptosis (XIAP) siRNA
ctgaggcaggagaattgcttgaa

SEQ ID NO: 17917 - DNA, 23 bp, Artificial Sequence
  Description of Artificial Sequence: Synthetic oligonucleotide
  X-linked inhibitor of apoptosis (XIAP) siRNA
tgaggcaggagaattgcttgaac

SEQ ID NO: 17918 - DNA, 23 bp, Artificial Sequence
  Description of Artificial Sequence: Synthetic oligonucleotide
  X-linked inhibitor of apoptosis (XIAP) siRNA
gaggcaggagaattgcttgaacc

SEQ ID NO: 17919 - DNA, 23 bp, Artificial Sequence
  Description of Artificial Sequence: Synthetic oligonucleotide
  X-linked inhibitor of apoptosis (XIAP) siRNA
aggcaggagaattgcttgaacct

SEQ ID NO: 17920 - DNA, 23 bp, Artificial Sequence
  Description of Artificial Sequence: Synthetic oligonucleotide
  X-linked inhibitor of apoptosis (XIAP) siRNA
ggcaggagaattgcttgaacctg

SEQ ID NO: 17921 - DNA, 23 bp, Artificial Sequence
  Description of Artificial Sequence: Synthetic oligonucleotide
  X-linked inhibitor of apoptosis (XIAP) siRNA
gcaggagaattgcttgaacctgg

SEQ ID NO: 17922 - DNA, 23 bp, Artificial Sequence
  Description of Artificial Sequence: Synthetic oligonucleotide
  X-linked inhibitor of apoptosis (XIAP) siRNA
caggagaattgcttgaacctggg

SEQ ID NO: 17923 - DNA, 23 bp, Artificial Sequence
  Description of Artificial Sequence: Synthetic oligonucleotide
  X-linked inhibitor of apoptosis (XIAP) siRNA
aggagaattgcttgaacctggga

SEQ ID NO: 17924 - DNA, 23 bp, Artificial Sequence
  Description of Artificial Sequence: Synthetic oligonucleotide
  X-linked inhibitor of apoptosis (XIAP) siRNA
ggagaattgcttgaacctgggag

SEQ ID NO: 17925 - DNA, 23 bp, Artificial Sequence
  Description of Artificial Sequence: Synthetic oligonucleotide
  X-linked inhibitor of apoptosis (XIAP) siRNA
gagaattgcttgaacctgggagg

SEQ ID NO: 17926 - DNA, 23 bp, Artificial Sequence
  Description of Artificial Sequence: Synthetic oligonucleotide
  X-linked inhibitor of apoptosis (XIAP) siRNA
agaattgcttgaacctgggaggc

SEQ ID NO: 17927 - DNA, 23 bp, Artificial Sequence
  Description of Artificial Sequence: Synthetic oligonucleotide
  X-linked inhibitor of apoptosis (XIAP) siRNA
gaattgcttgaacctgggaggcg

SEQ ID NO: 17928 - DNA, 23 bp, Artificial Sequence
  Description of Artificial Sequence: Synthetic oligonucleotide
  X-linked inhibitor of apoptosis (XIAP) siRNA
aattgcttgaacctgggaggcgg

SEQ ID NO: 17929 - DNA, 23 bp, Artificial Sequence
  Description of Artificial Sequence: Synthetic oligonucleotide
  X-linked inhibitor of apoptosis (XIAP) siRNA
attgcttgaacctgggaggcgga

SEQ ID NO: 17930 - DNA, 23 bp, Artificial Sequence
  Description of Artificial Sequence: Synthetic oligonucleotide
  X-linked inhibitor of apoptosis (XIAP) siRNA
ttgcttgaacctgggaggcggag

SEQ ID NO: 17931 - DNA, 23 bp, Artificial Sequence
  Description of Artificial Sequence: Synthetic oligonucleotide
  X-linked inhibitor of apoptosis (XIAP) siRNA
tgcttgaacctgggaggcggagg

SEQ ID NO: 17932 - DNA, 23 bp, Artificial Sequence
  Description of Artificial Sequence: Synthetic oligonucleotide
  X-linked inhibitor of apoptosis (XIAP) siRNA
gcttgaacctgggaggcggaggt

SEQ ID NO: 17933 - DNA, 23 bp, Artificial Sequence
  Description of Artificial Sequence: Synthetic oligonucleotide
  X-linked inhibitor of apoptosis (XIAP) siRNA
cttgaacctgggaggcggaggtt

SEQ ID NO: 17934 - DNA, 23 bp, Artificial Sequence
  Description of Artificial Sequence: Synthetic oligonucleotide
  X-linked inhibitor of apoptosis (XIAP) siRNA
ttgaacctgggaggcggaggttg

SEQ ID NO: 17935 - DNA, 23 bp, Artificial Sequence
  Description of Artificial Sequence: Synthetic oligonucleotide
  X-linked inhibitor of apoptosis (XIAP) siRNA
tgaacctgggaggcggaggttgc

SEQ ID NO: 17936 - DNA, 23 bp, Artificial Sequence
  Description of Artificial Sequence: Synthetic oligonucleotide
  X-linked inhibitor of apoptosis (XIAP) siRNA
gaacctgggaggcggaggttgca

SEQ ID NO: 17937 - DNA, 23 bp, Artificial Sequence
  Description of Artificial Sequence: Synthetic oligonucleotide
  X-linked inhibitor of apoptosis (XIAP) siRNA
aacctgggaggcggaggttgcag

SEQ ID NO: 17938 - DNA, 23 bp, Artificial Sequence
  Description of Artificial Sequence: Synthetic oligonucleotide
  X-linked inhibitor of apoptosis (XIAP) siRNA
acctgggaggcggaggttgcagg

SEQ ID NO: 17939 - DNA, 23 bp, Artificial Sequence
  Description of Artificial Sequence: Synthetic oligonucleotide
  X-linked inhibitor of apoptosis (XIAP) siRNA
cctgggaggcggaggttgcaggg

SEQ ID NO: 17940 - DNA, 23 bp, Artificial Sequence
  Description of Artificial Sequence: Synthetic oligonucleotide
  X-linked inhibitor of apoptosis (XIAP) siRNA
ctgggaggcggaggttgcaggga

SEQ ID NO: 17941 - DNA, 23 bp, Artificial Sequence
  Description of Artificial Sequence: Synthetic oligonucleotide
  X-linked inhibitor of apoptosis (XIAP) siRNA
tgggaggcggaggttgcagggag

SEQ ID NO: 17942 - DNA, 23 bp, Artificial Sequence
  Description of Artificial Sequence: Synthetic oligonucleotide
  X-linked inhibitor of apoptosis (XIAP) siRNA
gggaggcggaggttgcagggagc

SEQ ID NO: 17943 - DNA, 23 bp, Artificial Sequence
  Description of Artificial Sequence: Synthetic oligonucleotide
  X-linked inhibitor of apoptosis (XIAP) siRNA
ggaggcggaggttgcagggagcc

SEQ ID NO: 17944 - DNA, 23 bp, Artificial Sequence
  Description of Artificial Sequence: Synthetic oligonucleotide
  X-linked inhibitor of apoptosis (XIAP) siRNA
gaggcggaggttgcagggagcca

SEQ ID NO: 17945 - DNA, 23 bp, Artificial Sequence
  Description of Artificial Sequence: Synthetic oligonucleotide
  X-linked inhibitor of apoptosis (XIAP) siRNA
aggcggaggttgcagggagccaa

SEQ ID NO: 17946 - DNA, 23 bp, Artificial Sequence
  Description of Artificial Sequence: Synthetic oligonucleotide
  X-linked inhibitor of apoptosis (XIAP) siRNA
ggcggaggttgcagggagccaag

SEQ ID NO: 17947 - DNA, 23 bp, Artificial Sequence
  Description of Artificial Sequence: Synthetic oligonucleotide
  X-linked inhibitor of apoptosis (XIAP) siRNA
gcggaggttgcagggagccaaga

SEQ ID NO: 17948 - DNA, 23 bp, Artificial Sequence
  Description of Artificial Sequence: Synthetic oligonucleotide
  X-linked inhibitor of apoptosis (XIAP) siRNA
cggaggttgcagggagccaagat

SEQ ID NO: 17949 - DNA, 23 bp, Artificial Sequence
  Description of Artificial Sequence: Synthetic oligonucleotide
  X-linked inhibitor of apoptosis (XIAP) siRNA
ggaggttgcagggagccaagatg

SEQ ID NO: 17950 - DNA, 23 bp, Artificial Sequence
  Description of Artificial Sequence: Synthetic oligonucleotide
  X-linked inhibitor of apoptosis (XIAP) siRNA
gaggttgcagggagccaagatgg

SEQ ID NO: 17951 - DNA, 23 bp, Artificial Sequence
  Description of Artificial Sequence: Synthetic oligonucleotide
  X-linked inhibitor of apoptosis (XIAP) siRNA
aggttgcagggagccaagatggc

SEQ ID NO: 17952 - DNA, 23 bp, Artificial Sequence
  Description of Artificial Sequence: Synthetic oligonucleotide
  X-linked inhibitor of apoptosis (XIAP) siRNA
ggttgcagggagccaagatggcg

SEQ ID NO: 17953 - DNA, 23 bp, Artificial Sequence
  Description of Artificial Sequence: Synthetic oligonucleotide
  X-linked inhibitor of apoptosis (XIAP) siRNA
gttgcagggagccaagatggcgc

SEQ ID NO: 17954 - DNA, 23 bp, Artificial Sequence
  Description of Artificial Sequence: Synthetic oligonucleotide
  X-linked inhibitor of apoptosis (XIAP) siRNA
ttgcagggagccaagatggcgcc

SEQ ID NO: 17955 - DNA, 23 bp, Artificial Sequence
  Description of Artificial Sequence: Synthetic oligonucleotide
  X-linked inhibitor of apoptosis (XIAP) siRNA
tgcagggagccaagatggcgcca

SEQ ID NO: 17956 - DNA, 23 bp, Artificial Sequence
  Description of Artificial Sequence: Synthetic oligonucleotide
  X-linked inhibitor of apoptosis (XIAP) siRNA
gcagggagccaagatggcgccac

SEQ ID NO: 17957 - DNA, 23 bp, Artificial Sequence
  Description of Artificial Sequence: Synthetic oligonucleotide
  X-linked inhibitor of apoptosis (XIAP) siRNA
cagggagccaagatggcgccacc

SEQ ID NO: 17958 - DNA, 23 bp, Artificial Sequence
  Description of Artificial Sequence: Synthetic oligonucleotide
  X-linked inhibitor of apoptosis (XIAP) siRNA
agggagccaagatggcgccaccg

SEQ ID NO: 17959 - DNA, 23 bp, Artificial Sequence
  Description of Artificial Sequence: Synthetic oligonucleotide
  X-linked inhibitor of apoptosis (XIAP) siRNA
gggagccaagatggcgccaccgc

SEQ ID NO: 17960 - DNA, 23 bp, Artificial Sequence
  Description of Artificial Sequence: Synthetic oligonucleotide
  X-linked inhibitor of apoptosis (XIAP) siRNA
ggagccaagatggcgccaccgca

SEQ ID NO: 17961 - DNA, 23 bp, Artificial Sequence
  Description of Artificial Sequence: Synthetic oligonucleotide
  X-linked inhibitor of apoptosis (XIAP) siRNA
gagccaagatggcgccaccgcac

SEQ ID NO: 17962 - DNA, 23 bp, Artificial Sequence
  Description of Artificial Sequence: Synthetic oligonucleotide
  X-linked inhibitor of apoptosis (XIAP) siRNA
agccaagatggcgccaccgcact

SEQ ID NO: 17963 - DNA, 23 bp, Artificial Sequence
  Description of Artificial Sequence: Synthetic oligonucleotide
  X-linked inhibitor of apoptosis (XIAP) siRNA
gccaagatggcgccaccgcactc

SEQ ID NO: 17964 - DNA, 23 bp, Artificial Sequence
  Description of Artificial Sequence: Synthetic oligonucleotide
  X-linked inhibitor of apoptosis (XIAP) siRNA
ccaagatggcgccaccgcactcc

SEQ ID NO: 17965 - DNA, 23 bp, Artificial Sequence
  Description of Artificial Sequence: Synthetic oligonucleotide
  X-linked inhibitor of apoptosis (XIAP) siRNA
caagatggcgccaccgcactcca

SEQ ID NO: 17966 - DNA, 23 bp, Artificial Sequence
  Description of Artificial Sequence: Synthetic oligonucleotide
  X-linked inhibitor of apoptosis (XIAP) siRNA
aagatggcgccaccgcactccag

SEQ ID NO: 17967 - DNA, 23 bp, Artificial Sequence
  Description of Artificial Sequence: Synthetic oligonucleotide
  X-linked inhibitor of apoptosis (XIAP) siRNA
agatggcgccaccgcactccagc

SEQ ID NO: 17968 - DNA, 23 bp, Artificial Sequence
  Description of Artificial Sequence: Synthetic oligonucleotide
  X-linked inhibitor of apoptosis (XIAP) siRNA
gatggcgccaccgcactccagcc

SEQ ID NO: 17969 - DNA, 23 bp, Artificial Sequence
  Description of Artificial Sequence: Synthetic oligonucleotide
  X-linked inhibitor of apoptosis (XIAP) siRNA
atggcgccaccgcactccagcct

SEQ ID NO: 17970 - DNA, 23 bp, Artificial Sequence
  Description of Artificial Sequence: Synthetic oligonucleotide
  X-linked inhibitor of apoptosis (XIAP) siRNA
tggcgccaccgcactccagccta

SEQ ID NO: 17971 - DNA, 23 bp, Artificial Sequence
  Description of Artificial Sequence: Synthetic oligonucleotide
  X-linked inhibitor of apoptosis (XIAP) siRNA
ggcgccaccgcactccagcctag

SEQ ID NO: 17972 - DNA, 23 bp, Artificial Sequence
  Description of Artificial Sequence: Synthetic oligonucleotide
  X-linked inhibitor of apoptosis (XIAP) siRNA
gcgccaccgcactccagcctagg

SEQ ID NO: 17973 - DNA, 23 bp, Artificial Sequence
  Description of Artificial Sequence: Synthetic oligonucleotide
  X-linked inhibitor of apoptosis (XIAP) siRNA
cgccaccgcactccagcctaggt

SEQ ID NO: 17974 - DNA, 23 bp, Artificial Sequence
  Description of Artificial Sequence: Synthetic oligonucleotide
  X-linked inhibitor of apoptosis (XIAP) siRNA
gccaccgcactccagcctaggtg

SEQ ID NO: 17975 - DNA, 23 bp, Artificial Sequence
  Description of Artificial Sequence: Synthetic oligonucleotide
  X-linked inhibitor of apoptosis (XIAP) siRNA
ccaccgcactccagcctaggtga

SEQ ID NO: 17976 - DNA, 23 bp, Artificial Sequence
  Description of Artificial Sequence: Synthetic oligonucleotide
  X-linked inhibitor of apoptosis (XIAP) siRNA
caccgcactccagcctaggtgat

SEQ ID NO: 17977 - DNA, 23 bp, Artificial Sequence
  Description of Artificial Sequence: Synthetic oligonucleotide
  X-linked inhibitor of apoptosis (XIAP) siRNA
accgcactccagcctaggtgata

SEQ ID NO: 17978 - DNA, 23 bp, Artificial Sequence
  Description of Artificial Sequence: Synthetic oligonucleotide
  X-linked inhibitor of apoptosis (XIAP) siRNA
ccgcactccagcctaggtgatag

SEQ ID NO: 17979 - DNA, 23 bp, Artificial Sequence
  Description of Artificial Sequence: Synthetic oligonucleotide
  X-linked inhibitor of apoptosis (XIAP) siRNA
cgcactccagcctaggtgataga

SEQ ID NO: 17980 - DNA, 23 bp, Artificial Sequence
  Description of Artificial Sequence: Synthetic oligonucleotide
  X-linked inhibitor of apoptosis (XIAP) siRNA
gcactccagcctaggtgatagag

SEQ ID NO: 17981 - DNA, 23 bp, Artificial Sequence
  Description of Artificial Sequence: Synthetic oligonucleotide
  X-linked inhibitor of apoptosis (XIAP) siRNA
cactccagcctaggtgatagagt

SEQ ID NO: 17982 - DNA, 23 bp, Artificial Sequence
  Description of Artificial Sequence: Synthetic oligonucleotide
  X-linked inhibitor of apoptosis (XIAP) siRNA
actccagcctaggtgatagagtg

SEQ ID NO: 17983 - DNA, 23 bp, Artificial Sequence
  Description of Artificial Sequence: Synthetic oligonucleotide
  X-linked inhibitor of apoptosis (XIAP) siRNA
ctccagcctaggtgatagagtga

SEQ ID NO: 17984 - DNA, 23 bp, Artificial Sequence
  Description of Artificial Sequence: Synthetic oligonucleotide
  X-linked inhibitor of apoptosis (XIAP) siRNA
tccagcctaggtgatagagtgag

SEQ ID NO: 17985 - DNA, 23 bp, Artificial Sequence
  Description of Artificial Sequence: Synthetic oligonucleotide
  X-linked inhibitor of apoptosis (XIAP) siRNA
ccagcctaggtgatagagtgaga

SEQ ID NO: 17986 - DNA, 23 bp, Artificial Sequence
  Description of Artificial Sequence: Synthetic oligonucleotide
  X-linked inhibitor of apoptosis (XIAP) siRNA
cagcctaggtgatagagtgagac

SEQ ID NO: 17987 - DNA, 23 bp, Artificial Sequence
  Description of Artificial Sequence: Synthetic oligonucleotide
  X-linked inhibitor of apoptosis (XIAP) siRNA
agcctaggtgatagagtgagact

SEQ ID NO: 17988 - DNA, 23 bp, Artificial Sequence
  Description of Artificial Sequence: Synthetic oligonucleotide
  X-linked inhibitor of apoptosis (XIAP) siRNA
gcctaggtgatagagtgagactc

SEQ ID NO: 17989 - DNA, 23 bp, Artificial Sequence
  Description of Artificial Sequence: Synthetic oligonucleotide
  X-linked inhibitor of apoptosis (XIAP) siRNA
cctaggtgatagagtgagactcc

SEQ ID NO: 17990 - DNA, 23 bp, Artificial Sequence
  Description of Artificial Sequence: Synthetic oligonucleotide
  X-linked inhibitor of apoptosis (XIAP) siRNA
ctaggtgatagagtgagactccc

SEQ ID NO: 17991 - DNA, 23 bp, Artificial Sequence
  Description of Artificial Sequence: Synthetic oligonucleotide
  X-linked inhibitor of apoptosis (XIAP) siRNA
taggtgatagagtgagactccct

SEQ ID NO: 17992 - DNA, 23 bp, Artificial Sequence
  Description of Artificial Sequence: Synthetic oligonucleotide
  X-linked inhibitor of apoptosis (XIAP) siRNA
aggtgatagagtgagactccctc

SEQ ID NO: 17993 - DNA, 23 bp, Artificial Sequence
  Description of Artificial Sequence: Synthetic oligonucleotide
  X-linked inhibitor of apoptosis (XIAP) siRNA
ggtgatagagtgagactccctct

SEQ ID NO: 17994 - DNA, 23 bp, Artificial Sequence
  Description of Artificial Sequence: Synthetic oligonucleotide
  X-linked inhibitor of apoptosis (XIAP) siRNA
gtgatagagtgagactccctctc

SEQ ID NO: 17995 - DNA, 23 bp, Artificial Sequence
  Description of Artificial Sequence: Synthetic oligonucleotide
  X-linked inhibitor of apoptosis (XIAP) siRNA
tgatagagtgagactccctctca

SEQ ID NO: 17996 - DNA, 23 bp, Artificial Sequence
  Description of Artificial Sequence: Synthetic oligonucleotide
  X-linked inhibitor of apoptosis (XIAP) siRNA
gatagagtgagactccctctcaa

SEQ ID NO: 17997 - DNA, 23 bp, Artificial Sequence
  Description of Artificial Sequence: Synthetic oligonucleotide
  X-linked inhibitor of apoptosis (XIAP) siRNA
atagagtgagactccctctcaaa

SEQ ID NO: 17998 - DNA, 23 bp, Artificial Sequence
  Description of Artificial Sequence: Synthetic oligonucleotide
  X-linked inhibitor of apoptosis (XIAP) siRNA
tagagtgagactccctctcaaaa

SEQ ID NO: 17999 - DNA, 23 bp, Artificial Sequence
  Description of Artificial Sequence: Synthetic oligonucleotide
  X-linked inhibitor of apoptosis (XIAP) siRNA
agagtgagactccctctcaaaaa

SEQ ID NO: 18000 - DNA, 23 bp, Artificial Sequence
  Description of Artificial Sequence: Synthetic oligonucleotide
  X-linked inhibitor of apoptosis (XIAP) siRNA
gagtgagactccctctcaaaaac

SEQ ID NO: 18001 - DNA, 23 bp, Artificial Sequence
  Description of Artificial Sequence: Synthetic oligonucleotide
  X-linked inhibitor of apoptosis (XIAP) siRNA
agtgagactccctctcaaaaaca

SEQ ID NO: 18002 - DNA, 23 bp, Artificial Sequence
  Description of Artificial Sequence: Synthetic oligonucleotide
  X-linked inhibitor of apoptosis (XIAP) siRNA
gtgagactccctctcaaaaacaa

SEQ ID NO: 18003 - DNA, 23 bp, Artificial Sequence
  Description of Artificial Sequence: Synthetic oligonucleotide
  X-linked inhibitor of apoptosis (XIAP) siRNA
tgagactccctctcaaaaacaaa

SEQ ID NO: 18004 - DNA, 23 bp, Artificial Sequence
  Description of Artificial Sequence: Synthetic oligonucleotide
  X-linked inhibitor of apoptosis (XIAP) siRNA
gagactccctctcaaaaacaaaa

SEQ ID NO: 18005 - DNA, 23 bp, Artificial Sequence
  Description of Artificial Sequence: Synthetic oligonucleotide
  X-linked inhibitor of apoptosis (XIAP) siRNA
agactccctctcaaaaacaaaac

SEQ ID NO: 18006 - DNA, 23 bp, Artificial Sequence
  Description of Artificial Sequence: Synthetic oligonucleotide
  X-linked inhibitor of apoptosis (XIAP) siRNA
gactccctctcaaaaacaaaaca

SEQ ID NO: 18007 - DNA, 23 bp, Artificial Sequence
  Description of Artificial Sequence: Synthetic oligonucleotide
  X-linked inhibitor of apoptosis (XIAP) siRNA
actccctctcaaaaacaaaacaa

SEQ ID NO: 18008 - DNA, 23 bp, Artificial Sequence
  Description of Artificial Sequence: Synthetic oligonucleotide
  X-linked inhibitor of apoptosis (XIAP) siRNA
ctccctctcaaaaacaaaacaaa

SEQ ID NO: 18009 - DNA, 23 bp, Artificial Sequence
  Description of Artificial Sequence: Synthetic oligonucleotide
  X-linked inhibitor of apoptosis (XIAP) siRNA
tccctctcaaaaacaaaacaaaa

SEQ ID NO: 18010 - DNA, 23 bp, Artificial Sequence
  Description of Artificial Sequence: Synthetic oligonucleotide
  X-linked inhibitor of apoptosis (XIAP) siRNA
ccctctcaaaaacaaaacaaaac

SEQ ID NO: 18011 - DNA, 23 bp, Artificial Sequence
  Description of Artificial Sequence: Synthetic oligonucleotide
  X-linked inhibitor of apoptosis (XIAP) siRNA
cctctcaaaaacaaaacaaaaca

SEQ ID NO: 18012 - DNA, 23 bp, Artificial Sequence
  Description of Artificial Sequence: Synthetic oligonucleotide
  X-linked inhibitor of apoptosis (XIAP) siRNA
ctctcaaaaacaaaacaaaacaa

SEQ ID NO: 18013 - DNA, 23 bp, Artificial Sequence
  Description of Artificial Sequence: Synthetic oligonucleotide
  X-linked inhibitor of apoptosis (XIAP) siRNA
tctcaaaaacaaaacaaaacaaa

SEQ ID NO: 18014 - DNA, 23 bp, Artificial Sequence
  Description of Artificial Sequence: Synthetic oligonucleotide
  X-linked inhibitor of apoptosis (XIAP) siRNA
ctcaaaaacaaaacaaaacaaaa

SEQ ID NO: 18015 - DNA, 23 bp, Artificial Sequence
  Description of Artificial Sequence: Synthetic oligonucleotide
  X-linked inhibitor of apoptosis (XIAP) siRNA
tcaaaaacaaaacaaaacaaaaa

SEQ ID NO: 18016 - DNA, 23 bp, Artificial Sequence
  Description of Artificial Sequence: Synthetic oligonucleotide
  X-linked inhibitor of apoptosis (XIAP) siRNA
caaaaacaaaacaaaacaaaaaa

SEQ ID NO: 18017 - DNA, 23 bp, Artificial Sequence
  Description of Artificial Sequence: Synthetic oligonucleotide
  X-linked inhibitor of apoptosis (XIAP) siRNA
aaaaacaaaacaaaacaaaaaaa

SEQ ID NO: 18018 - DNA, 23 bp, Artificial Sequence
  Description of Artificial Sequence: Synthetic oligonucleotide
  X-linked inhibitor of apoptosis (XIAP) siRNA
aaaacaaaacaaaacaaaaaaat

SEQ ID NO: 18019 - DNA, 23 bp, Artificial Sequence
  Description of Artificial Sequence: Synthetic oligonucleotide
  X-linked inhibitor of apoptosis (XIAP) siRNA
aaacaaaacaaaacaaaaaaatt

SEQ ID NO: 18020 - DNA, 23 bp, Artificial Sequence
  Description of Artificial Sequence: Synthetic oligonucleotide
  X-linked inhibitor of apoptosis (XIAP) siRNA
aacaaaacaaaacaaaaaaatta

SEQ ID NO: 18021 - DNA, 23 bp, Artificial Sequence
  Description of Artificial Sequence: Synthetic oligonucleotide
  X-linked inhibitor of apoptosis (XIAP) siRNA
acaaaacaaaacaaaaaaattag

SEQ ID NO: 18022 - DNA, 23 bp, Artificial Sequence
  Description of Artificial Sequence: Synthetic oligonucleotide
  X-linked inhibitor of apoptosis (XIAP) siRNA
caaaacaaaacaaaaaaattaga

SEQ ID NO: 18023 - DNA, 23 bp, Artificial Sequence
  Description of Artificial Sequence: Synthetic oligonucleotide
  X-linked inhibitor of apoptosis (XIAP) siRNA
aaaacaaaacaaaaaaattagac

SEQ ID NO: 18024 - DNA, 23 bp, Artificial Sequence
  Description of Artificial Sequence: Synthetic oligonucleotide
  X-linked inhibitor of apoptosis (XIAP) siRNA
aaacaaaacaaaaaaattagaca

SEQ ID NO: 18025 - DNA, 23 bp, Artificial Sequence
  Description of Artificial Sequence: Synthetic oligonucleotide
  X-linked inhibitor of apoptosis (XIAP) siRNA
aacaaaacaaaaaaattagacaa

SEQ ID NO: 18026 - DNA, 23 bp, Artificial Sequence
  Description of Artificial Sequence: Synthetic oligonucleotide
  X-linked inhibitor of apoptosis (XIAP) siRNA
acaaaacaaaaaaattagacaaa

SEQ ID NO: 18027 - DNA, 23 bp, Artificial Sequence
  Description of Artificial Sequence: Synthetic oligonucleotide
  X-linked inhibitor of apoptosis (XIAP) siRNA
caaaacaaaaaaattagacaaat

SEQ ID NO: 18028 - DNA, 23 bp, Artificial Sequence
  Description of Artificial Sequence: Synthetic oligonucleotide
  X-linked inhibitor of apoptosis (XIAP) siRNA
aaaacaaaaaaattagacaaatg

SEQ ID NO: 18029 - DNA, 23 bp, Artificial Sequence
  Description of Artificial Sequence: Synthetic oligonucleotide
  X-linked inhibitor of apoptosis (XIAP) siRNA
aaacaaaaaaattagacaaatgc

SEQ ID NO: 18030 - DNA, 23 bp, Artificial Sequence
  Description of Artificial Sequence: Synthetic oligonucleotide
  X-linked inhibitor of apoptosis (XIAP) siRNA
aacaaaaaaattagacaaatgct

SEQ ID NO: 18031 - DNA, 23 bp, Artificial Sequence
  Description of Artificial Sequence: Synthetic oligonucleotide
  X-linked inhibitor of apoptosis (XIAP) siRNA
acaaaaaaattagacaaatgcta

SEQ ID NO: 18032 - DNA, 23 bp, Artificial Sequence
  Description of Artificial Sequence: Synthetic oligonucleotide
  X-linked inhibitor of apoptosis (XIAP) siRNA
caaaaaaattagacaaatgctac

SEQ ID NO: 18033 - DNA, 23 bp, Artificial Sequence
  Description of Artificial Sequence: Synthetic oligonucleotide
  X-linked inhibitor of apoptosis (XIAP) siRNA
aaaaaaattagacaaatgctaca

SEQ ID NO: 18034 - DNA, 23 bp, Artificial Sequence
  Description of Artificial Sequence: Synthetic oligonucleotide
  X-linked inhibitor of apoptosis (XIAP) siRNA
aaaaaattagacaaatgctacat

SEQ ID NO: 18035 - DNA, 23 bp, Artificial Sequence
  Description of Artificial Sequence: Synthetic oligonucleotide
  X-linked inhibitor of apoptosis (XIAP) siRNA
aaaaattagacaaatgctacatt

SEQ ID NO: 18036 - DNA, 23 bp, Artificial Sequence
  Description of Artificial Sequence: Synthetic oligonucleotide
  X-linked inhibitor of apoptosis (XIAP) siRNA
aaaattagacaaatgctacatta

SEQ ID NO: 18037 - DNA, 23 bp, Artificial Sequence
  Description of Artificial Sequence: Synthetic oligonucleotide
  X-linked inhibitor of apoptosis (XIAP) siRNA
aaattagacaaatgctacattaa

SEQ ID NO: 18038 - DNA, 23 bp, Artificial Sequence
  Description of Artificial Sequence: Synthetic oligonucleotide
  X-linked inhibitor of apoptosis (XIAP) siRNA
aattagacaaatgctacattaat

SEQ ID NO: 18039 - DNA, 23 bp, Artificial Sequence
  Description of Artificial Sequence: Synthetic oligonucleotide
  X-linked inhibitor of apoptosis (XIAP) siRNA
attagacaaatgctacattaatg

SEQ ID NO: 18040 - DNA, 23 bp, Artificial Sequence
  Description of Artificial Sequence: Synthetic oligonucleotide
  X-linked inhibitor of apoptosis (XIAP) siRNA
ttagacaaatgctacattaatgt

SEQ ID NO: 18041 - DNA, 23 bp, Artificial Sequence
  Description of Artificial Sequence: Synthetic oligonucleotide
  X-linked inhibitor of apoptosis (XIAP) siRNA
tagacaaatgctacattaatgtt

SEQ ID NO: 18042 - DNA, 23 bp, Artificial Sequence
  Description of Artificial Sequence: Synthetic oligonucleotide
  X-linked inhibitor of apoptosis (XIAP) siRNA
agacaaatgctacattaatgttt

SEQ ID NO: 18043 - DNA, 23 bp, Artificial Sequence
  Description of Artificial Sequence: Synthetic oligonucleotide
  X-linked inhibitor of apoptosis (XIAP) siRNA
gacaaatgctacattaatgtttg

SEQ ID NO: 18044 - DNA, 23 bp, Artificial Sequence
  Description of Artificial Sequence: Synthetic oligonucleotide
  X-linked inhibitor of apoptosis (XIAP) siRNA
acaaatgctacattaatgtttgg

SEQ ID NO: 18045 - DNA, 23 bp, Artificial Sequence
  Description of Artificial Sequence: Synthetic oligonucleotide
  X-linked inhibitor of apoptosis (XIAP) siRNA
caaatgctacattaatgtttggg

SEQ ID NO: 18046 - DNA, 23 bp, Artificial Sequence
  Description of Artificial Sequence: Synthetic oligonucleotide
  X-linked inhibitor of apoptosis (XIAP) siRNA
aaatgctacattaatgtttgggt

SEQ ID NO: 18047 - DNA, 23 bp, Artificial Sequence
  Description of Artificial Sequence: Synthetic oligonucleotide
  X-linked inhibitor of apoptosis (XIAP) siRNA
aatgctacattaatgtttgggtg

SEQ ID NO: 18048 - DNA, 23 bp, Artificial Sequence
  Description of Artificial Sequence: Synthetic oligonucleotide
  X-linked inhibitor of apoptosis (XIAP) siRNA
atgctacattaatgtttgggtgg

SEQ ID NO: 18049 - DNA, 23 bp, Artificial Sequence
  Description of Artificial Sequence: Synthetic oligonucleotide
  X-linked inhibitor of apoptosis (XIAP) siRNA
tgctacattaatgtttgggtggt

SEQ ID NO: 18050 - DNA, 23 bp, Artificial Sequence
  Description of Artificial Sequence: Synthetic oligonucleotide
  X-linked inhibitor of apoptosis (XIAP) siRNA
gctacattaatgtttgggtggtc

SEQ ID NO: 18051 - DNA, 23 bp, Artificial Sequence
  Description of Artificial Sequence: Synthetic oligonucleotide
  X-linked inhibitor of apoptosis (XIAP) siRNA
ctacattaatgtttgggtggtca

SEQ ID NO: 18052 - DNA, 23 bp, Artificial Sequence
  Description of Artificial Sequence: Synthetic oligonucleotide
  X-linked inhibitor of apoptosis (XIAP) siRNA
tacattaatgtttgggtggtcag

SEQ ID NO: 18053 - DNA, 23 bp, Artificial Sequence
  Description of Artificial Sequence: Synthetic oligonucleotide
  X-linked inhibitor of apoptosis (XIAP) siRNA
acattaatgtttgggtggtcaga

SEQ ID NO: 18054 - DNA, 23 bp, Artificial Sequence
  Description of Artificial Sequence: Synthetic oligonucleotide
  X-linked inhibitor of apoptosis (XIAP) siRNA
cattaatgtttgggtggtcagat

SEQ ID NO: 18055 - DNA, 23 bp, Artificial Sequence
  Description of Artificial Sequence: Synthetic oligonucleotide
  X-linked inhibitor of apoptosis (XIAP) siRNA
attaatgtttgggtggtcagatt

SEQ ID NO: 18056 - DNA, 23 bp, Artificial Sequence
  Description of Artificial Sequence: Synthetic oligonucleotide
  X-linked inhibitor of apoptosis (XIAP) siRNA
ttaatgtttgggtggtcagattc

SEQ ID NO: 18057 - DNA, 23 bp, Artificial Sequence
  Description of Artificial Sequence: Synthetic oligonucleotide
  X-linked inhibitor of apoptosis (XIAP) siRNA
taatgtttgggtggtcagattct

SEQ ID NO: 18058 - DNA, 23 bp, Artificial Sequence
  Description of Artificial Sequence: Synthetic oligonucleotide
  X-linked inhibitor of apoptosis (XIAP) siRNA
aatgtttgggtggtcagattcta

SEQ ID NO: 18059 - DNA, 23 bp, Artificial Sequence
  Description of Artificial Sequence: Synthetic oligonucleotide
  X-linked inhibitor of apoptosis (XIAP) siRNA
atgtttgggtggtcagattctac

SEQ ID NO: 18060 - DNA, 23 bp, Artificial Sequence
  Description of Artificial Sequence: Synthetic oligonucleotide
  X-linked inhibitor of apoptosis (XIAP) siRNA
tgtttgggtggtcagattctact

SEQ ID NO: 18061 - DNA, 23 bp, Artificial Sequence
  Description of Artificial Sequence: Synthetic oligonucleotide
  X-linked inhibitor of apoptosis (XIAP) siRNA
gtttgggtggtcagattctactt

SEQ ID NO: 18062 - DNA, 23 bp, Artificial Sequence
  Description of Artificial Sequence: Synthetic oligonucleotide
  X-linked inhibitor of apoptosis (XIAP) siRNA
tttgggtggtcagattctacttt

SEQ ID NO: 18063 - DNA, 23 bp, Artificial Sequence
  Description of Artificial Sequence: Synthetic oligonucleotide
  X-linked inhibitor of apoptosis (XIAP) siRNA
ttgggtggtcagattctactttg

SEQ ID NO: 18064 - DNA, 23 bp, Artificial Sequence
  Description of Artificial Sequence: Synthetic oligonucleotide
  X-linked inhibitor of apoptosis (XIAP) siRNA
tgggtggtcagattctactttga

SEQ ID NO: 18065 - DNA, 23 bp, Artificial Sequence
  Description of Artificial Sequence: Synthetic oligonucleotide
  X-linked inhibitor of apoptosis (XIAP) siRNA
gggtggtcagattctactttgaa

SEQ ID NO: 18066 - DNA, 23 bp, Artificial Sequence
  Description of Artificial Sequence: Synthetic oligonucleotide
  X-linked inhibitor of apoptosis (XIAP) siRNA
ggtggtcagattctactttgaat

SEQ ID NO: 18067 - DNA, 23 bp, Artificial Sequence
  Description of Artificial Sequence: Synthetic oligonucleotide
  X-linked inhibitor of apoptosis (XIAP) siRNA
gtggtcagattctactttgaatc

SEQ ID NO: 18068 - DNA, 23 bp, Artificial Sequence
  Description of Artificial Sequence: Synthetic oligonucleotide
  X-linked inhibitor of apoptosis (XIAP) siRNA
tggtcagattctactttgaatct

SEQ ID NO: 18069 - DNA, 23 bp, Artificial Sequence
  Description of Artificial Sequence: Synthetic oligonucleotide
  X-linked inhibitor of apoptosis (XIAP) siRNA
ggtcagattctactttgaatctg

SEQ ID NO: 18070 - DNA, 23 bp, Artificial Sequence
  Description of Artificial Sequence: Synthetic oligonucleotide
  X-linked inhibitor of apoptosis (XIAP) siRNA
gtcagattctactttgaatctga

SEQ ID NO: 18071 - DNA, 23 bp, Artificial Sequence
  Description of Artificial Sequence: Synthetic oligonucleotide
  X-linked inhibitor of apoptosis (XIAP) siRNA
tcagattctactttgaatctgaa

SEQ ID NO: 18072 - DNA, 23 bp, Artificial Sequence
  Description of Artificial Sequence: Synthetic oligonucleotide
  X-linked inhibitor of apoptosis (XIAP) siRNA
cagattctactttgaatctgaag

SEQ ID NO: 18073 - DNA, 23 bp, Artificial Sequence
  Description of Artificial Sequence: Synthetic oligonucleotide
  X-linked inhibitor of apoptosis (XIAP) siRNA
agattctactttgaatctgaagt

SEQ ID NO: 18074 - DNA, 23 bp, Artificial Sequence
  Description of Artificial Sequence: Synthetic oligonucleotide
  X-linked inhibitor of apoptosis (XIAP) siRNA
gattctactttgaatctgaagtt

SEQ ID NO: 18075 - DNA, 23 bp, Artificial Sequence
  Description of Artificial Sequence: Synthetic oligonucleotide
  X-linked inhibitor of apoptosis (XIAP) siRNA
attctactttgaatctgaagttt

SEQ ID NO: 18076 - DNA, 23 bp, Artificial Sequence
  Description of Artificial Sequence: Synthetic oligonucleotide
  X-linked inhibitor of apoptosis (XIAP) siRNA
ttctactttgaatctgaagtttg

SEQ ID NO: 18077 - DNA, 23 bp, Artificial Sequence
  Description of Artificial Sequence: Synthetic oligonucleotide
  X-linked inhibitor of apoptosis (XIAP) siRNA
tctactttgaatctgaagtttgc

SEQ ID NO: 18078 - DNA, 23 bp, Artificial Sequence
  Description of Artificial Sequence: Synthetic oligonucleotide
  X-linked inhibitor of apoptosis (XIAP) siRNA
ctactttgaatctgaagtttgca

SEQ ID NO: 18079 - DNA, 23 bp, Artificial Sequence
  Description of Artificial Sequence: Synthetic oligonucleotide
  X-linked inhibitor of apoptosis (XIAP) siRNA
tactttgaatctgaagtttgcag

SEQ ID NO: 18080 - DNA, 23 bp, Artificial Sequence
  Description of Artificial Sequence: Synthetic oligonucleotide
  X-linked inhibitor of apoptosis (XIAP) siRNA
actttgaatctgaagtttgcaga

SEQ ID NO: 18081 - DNA, 23 bp, Artificial Sequence
  Description of Artificial Sequence: Synthetic oligonucleotide
  X-linked inhibitor of apoptosis (XIAP) siRNA
ctttgaatctgaagtttgcagat

SEQ ID NO: 18082 - DNA, 23 bp, Artificial Sequence
  Description of Artificial Sequence: Synthetic oligonucleotide
  X-linked inhibitor of apoptosis (XIAP) siRNA
tttgaatctgaagtttgcagata

SEQ ID NO: 18083 - DNA, 23 bp, Artificial Sequence
  Description of Artificial Sequence: Synthetic oligonucleotide
  X-linked inhibitor of apoptosis (XIAP) siRNA
ttgaatctgaagtttgcagatat

SEQ ID NO: 18084 - DNA, 23 bp, Artificial Sequence
  Description of Artificial Sequence: Synthetic oligonucleotide
  X-linked inhibitor of apoptosis (XIAP) siRNA
tgaatctgaagtttgcagatatg

SEQ ID NO: 18085 - DNA, 23 bp, Artificial Sequence
  Description of Artificial Sequence: Synthetic oligonucleotide
  X-linked inhibitor of apoptosis (XIAP) siRNA
gaatctgaagtttgcagatatgc

SEQ ID NO: 18086 - DNA, 23 bp, Artificial Sequence
  Description of Artificial Sequence: Synthetic oligonucleotide
  X-linked inhibitor of apoptosis (XIAP) siRNA
aatctgaagtttgcagatatgcc

SEQ ID NO: 18087 - DNA, 23 bp, Artificial Sequence
  Description of Artificial Sequence: Synthetic oligonucleotide
  X-linked inhibitor of apoptosis (XIAP) siRNA
atctgaagtttgcagatatgcct

SEQ ID NO: 18088 - DNA, 23 bp, Artificial Sequence
  Description of Artificial Sequence: Synthetic oligonucleotide
  X-linked inhibitor of apoptosis (XIAP) siRNA
tctgaagtttgcagatatgccta

SEQ ID NO: 18089 - DNA, 23 bp, Artificial Sequence
  Description of Artificial Sequence: Synthetic oligonucleotide
  X-linked inhibitor of apoptosis (XIAP) siRNA
ctgaagtttgcagatatgcctat

SEQ ID NO: 18090 - DNA, 23 bp, Artificial Sequence
  Description of Artificial Sequence: Synthetic oligonucleotide
  X-linked inhibitor of apoptosis (XIAP) siRNA
tgaagtttgcagatatgcctata

SEQ ID NO: 18091 - DNA, 23 bp, Artificial Sequence
  Description of Artificial Sequence: Synthetic oligonucleotide
  X-linked inhibitor of apoptosis (XIAP) siRNA
gaagtttgcagatatgcctatag

SEQ ID NO: 18092 - DNA, 23 bp, Artificial Sequence
  Description of Artificial Sequence: Synthetic oligonucleotide
  X-linked inhibitor of apoptosis (XIAP) siRNA
aagtttgcagatatgcctataga

SEQ ID NO: 18093 - DNA, 23 bp, Artificial Sequence
  Description of Artificial Sequence: Synthetic oligonucleotide
  X-linked inhibitor of apoptosis (XIAP) siRNA
agtttgcagatatgcctatagat

SEQ ID NO: 18094 - DNA, 23 bp, Artificial Sequence
  Description of Artificial Sequence: Synthetic oligonucleotide
  X-linked inhibitor of apoptosis (XIAP) siRNA
gtttgcagatatgcctatagatt

SEQ ID NO: 18095 - DNA, 23 bp, Artificial Sequence
  Description of Artificial Sequence: Synthetic oligonucleotide
  X-linked inhibitor of apoptosis (XIAP) siRNA
tttgcagatatgcctatagattt

SEQ ID NO: 18096 - DNA, 23 bp, Artificial Sequence
  Description of Artificial Sequence: Synthetic oligonucleotide
  X-linked inhibitor of apoptosis (XIAP) siRNA
ttgcagatatgcctatagatttt

SEQ ID NO: 18097 - DNA, 23 bp, Artificial Sequence
  Description of Artificial Sequence: Synthetic oligonucleotide
  X-linked inhibitor of apoptosis (XIAP) siRNA
tgcagatatgcctatagattttt

SEQ ID NO: 18098 - DNA, 23 bp, Artificial Sequence
  Description of Artificial Sequence: Synthetic oligonucleotide
  X-linked inhibitor of apoptosis (XIAP) siRNA
gcagatatgcctatagatttttg

SEQ ID NO: 18099 - DNA, 23 bp, Artificial Sequence
  Description of Artificial Sequence: Synthetic oligonucleotide
  X-linked inhibitor of apoptosis (XIAP) siRNA
cagatatgcctatagatttttgg

SEQ ID NO: 18100 - DNA, 23 bp, Artificial Sequence
  Description of Artificial Sequence: Synthetic oligonucleotide
  X-linked inhibitor of apoptosis (XIAP) siRNA
agatatgcctatagatttttgga

SEQ ID NO: 18101 - DNA, 23 bp, Artificial Sequence
  Description of Artificial Sequence: Synthetic oligonucleotide
  X-linked inhibitor of apoptosis (XIAP) siRNA
gatatgcctatagatttttggag

SEQ ID NO: 18102 - DNA, 23 bp, Artificial Sequence
  Description of Artificial Sequence: Synthetic oligonucleotide
  X-linked inhibitor of apoptosis (XIAP) siRNA
atatgcctatagatttttggagt

SEQ ID NO: 18103 - DNA, 23 bp, Artificial Sequence
  Description of Artificial Sequence: Synthetic oligonucleotide
  X-linked inhibitor of apoptosis (XIAP) siRNA
tatgcctatagatttttggagtt

SEQ ID NO: 18104 - DNA, 23 bp, Artificial Sequence
  Description of Artificial Sequence: Synthetic oligonucleotide
  X-linked inhibitor of apoptosis (XIAP) siRNA
atgcctatagatttttggagttt

SEQ ID NO: 18105 - DNA, 23 bp, Artificial Sequence
  Description of Artificial Sequence: Synthetic oligonucleotide
  X-linked inhibitor of apoptosis (XIAP) siRNA
tgcctatagatttttggagttta

SEQ ID NO: 18106 - DNA, 23 bp, Artificial Sequence
  Description of Artificial Sequence: Synthetic oligonucleotide
  X-linked inhibitor of apoptosis (XIAP) siRNA
gcctatagatttttggagtttac

SEQ ID NO: 18107 - DNA, 23 bp, Artificial Sequence
  Description of Artificial Sequence: Synthetic oligonucleotide
  X-linked inhibitor of apoptosis (XIAP) siRNA
cctatagatttttggagtttacc

SEQ ID NO: 18108 - DNA, 23 bp, Artificial Sequence
  Description of Artificial Sequence: Synthetic oligonucleotide
  X-linked inhibitor of apoptosis (XIAP) siRNA
ctatagatttttggagtttacca

SEQ ID NO: 18109 - DNA, 23 bp, Artificial Sequence
  Description of Artificial Sequence: Synthetic oligonucleotide
  X-linked inhibitor of apoptosis (XIAP) siRNA
tatagatttttggagtttaccac

SEQ ID NO: 18110 - DNA, 23 bp, Artificial Sequence
  Description of Artificial Sequence: Synthetic oligonucleotide
  X-linked inhibitor of apoptosis (XIAP) siRNA
atagatttttggagtttaccact

SEQ ID NO: 18111 - DNA, 23 bp, Artificial Sequence
  Description of Artificial Sequence: Synthetic oligonucleotide
  X-linked inhibitor of apoptosis (XIAP) siRNA
tagatttttggagtttaccactt

SEQ ID NO: 18112 - DNA, 23 bp, Artificial Sequence
  Description of Artificial Sequence: Synthetic oligonucleotide
  X-linked inhibitor of apoptosis (XIAP) siRNA
agatttttggagtttaccacttt

SEQ ID NO: 18113 - DNA, 23 bp, Artificial Sequence
  Description of Artificial Sequence: Synthetic oligonucleotide
  X-linked inhibitor of apoptosis (XIAP) siRNA
gatttttggagtttaccactttc

SEQ ID NO: 18114 - DNA, 23 bp, Artificial Sequence
  Description of Artificial Sequence: Synthetic oligonucleotide
  X-linked inhibitor of apoptosis (XIAP) siRNA
atttttggagtttaccactttct

SEQ ID NO: 18115 - DNA, 23 bp, Artificial Sequence
  Description of Artificial Sequence: Synthetic oligonucleotide
  X-linked inhibitor of apoptosis (XIAP) siRNA
tttttggagtttaccactttctt

SEQ ID NO: 18116 - DNA, 23 bp, Artificial Sequence
  Description of Artificial Sequence: Synthetic oligonucleotide
  X-linked inhibitor of apoptosis (XIAP) siRNA
ttttggagtttaccactttctta

SEQ ID NO: 18117 - DNA, 23 bp, Artificial Sequence
  Description of Artificial Sequence: Synthetic oligonucleotide
  X-linked inhibitor of apoptosis (XIAP) siRNA
tttggagtttaccactttcttat

SEQ ID NO: 18118 - DNA, 23 bp, Artificial Sequence
  Description of Artificial Sequence: Synthetic oligonucleotide
  X-linked inhibitor of apoptosis (XIAP) siRNA
ttggagtttaccactttcttatt

SEQ ID NO: 18119 - DNA, 23 bp, Artificial Sequence
  Description of Artificial Sequence: Synthetic oligonucleotide
  X-linked inhibitor of apoptosis (XIAP) siRNA
tggagtttaccactttcttattc

SEQ ID NO: 18120 - DNA, 23 bp, Artificial Sequence
  Description of Artificial Sequence: Synthetic oligonucleotide
  X-linked inhibitor of apoptosis (XIAP) siRNA
ggagtttaccactttcttattct

SEQ ID NO: 18121 - DNA, 23 bp, Artificial Sequence
  Description of Artificial Sequence: Synthetic oligonucleotide
  X-linked inhibitor of apoptosis (XIAP) siRNA
gagtttaccactttcttattctg

SEQ ID NO: 18122 - DNA, 23 bp, Artificial Sequence
  Description of Artificial Sequence: Synthetic oligonucleotide
  X-linked inhibitor of apoptosis (XIAP) siRNA
agtttaccactttcttattctgt

SEQ ID NO: 18123 - DNA, 23 bp, Artificial Sequence
  Description of Artificial Sequence: Synthetic oligonucleotide
  X-linked inhibitor of apoptosis (XIAP) siRNA
gtttaccactttcttattctgta

SEQ ID NO: 18124 - DNA, 23 bp, Artificial Sequence
  Description of Artificial Sequence: Synthetic oligonucleotide
  X-linked inhibitor of apoptosis (XIAP) siRNA
tttaccactttcttattctgtat

SEQ ID NO: 18125 - DNA, 23 bp, Artificial Sequence
  Description of Artificial Sequence: Synthetic oligonucleotide
  X-linked inhibitor of apoptosis (XIAP) siRNA
ttaccactttcttattctgtatc

SEQ ID NO: 18126 - DNA, 23 bp, Artificial Sequence
  Description of Artificial Sequence: Synthetic oligonucleotide
  X-linked inhibitor of apoptosis (XIAP) siRNA
taccactttcttattctgtatca

SEQ ID NO: 18127 - DNA, 23 bp, Artificial Sequence
  Description of Artificial Sequence: Synthetic oligonucleotide
  X-linked inhibitor of apoptosis (XIAP) siRNA
accactttcttattctgtatcat

SEQ ID NO: 18128 - DNA, 23 bp, Artificial Sequence
  Description of Artificial Sequence: Synthetic oligonucleotide
  X-linked inhibitor of apoptosis (XIAP) siRNA
ccactttcttattctgtatcatt

SEQ ID NO: 18129 - DNA, 23 bp, Artificial Sequence
  Description of Artificial Sequence: Synthetic oligonucleotide
  X-linked inhibitor of apoptosis (XIAP) siRNA
cactttcttattctgtatcatta

SEQ ID NO: 18130 - DNA, 23 bp, Artificial Sequence
  Description of Artificial Sequence: Synthetic oligonucleotide
  X-linked inhibitor of apoptosis (XIAP) siRNA
actttcttattctgtatcattaa

SEQ ID NO: 18131 - DNA, 23 bp, Artificial Sequence
  Description of Artificial Sequence: Synthetic oligonucleotide
  X-linked inhibitor of apoptosis (XIAP) siRNA
ctttcttattctgtatcattaat

SEQ ID NO: 18132 - DNA, 23 bp, Artificial Sequence
  Description of Artificial Sequence: Synthetic oligonucleotide
  X-linked inhibitor of apoptosis (XIAP) siRNA
tttcttattctgtatcattaatg

SEQ ID NO: 18133 - DNA, 23 bp, Artificial Sequence
  Description of Artificial Sequence: Synthetic oligonucleotide
  X-linked inhibitor of apoptosis (XIAP) siRNA
ttcttattctgtatcattaatgt

SEQ ID NO: 18134 - DNA, 23 bp, Artificial Sequence
  Description of Artificial Sequence: Synthetic oligonucleotide
  X-linked inhibitor of apoptosis (XIAP) siRNA
tcttattctgtatcattaatgta

SEQ ID NO: 18135 - DNA, 23 bp, Artificial Sequence
  Description of Artificial Sequence: Synthetic oligonucleotide
  X-linked inhibitor of apoptosis (XIAP) siRNA
cttattctgtatcattaatgtaa

SEQ ID NO: 18136 - DNA, 23 bp, Artificial Sequence
  Description of Artificial Sequence: Synthetic oligonucleotide
  X-linked inhibitor of apoptosis (XIAP) siRNA
ttattctgtatcattaatgtaat

SEQ ID NO: 18137 - DNA, 23 bp, Artificial Sequence
  Description of Artificial Sequence: Synthetic oligonucleotide
  X-linked inhibitor of apoptosis (XIAP) siRNA
tattctgtatcattaatgtaata

SEQ ID NO: 18138 - DNA, 23 bp, Artificial Sequence
  Description of Artificial Sequence: Synthetic oligonucleotide
  X-linked inhibitor of apoptosis (XIAP) siRNA
attctgtatcattaatgtaatat

SEQ ID NO: 18139 - DNA, 23 bp, Artificial Sequence
  Description of Artificial Sequence: Synthetic oligonucleotide
  X-linked inhibitor of apoptosis (XIAP) siRNA
ttctgtatcattaatgtaatatt

SEQ ID NO: 18140 - DNA, 23 bp, Artificial Sequence
  Description of Artificial Sequence: Synthetic oligonucleotide
  X-linked inhibitor of apoptosis (XIAP) siRNA
tctgtatcattaatgtaatattt

SEQ ID NO: 18141 - DNA, 23 bp, Artificial Sequence
  Description of Artificial Sequence: Synthetic oligonucleotide
  X-linked inhibitor of apoptosis (XIAP) siRNA
ctgtatcattaatgtaatatttt

SEQ ID NO: 18142 - DNA, 23 bp, Artificial Sequence
  Description of Artificial Sequence: Synthetic oligonucleotide
  X-linked inhibitor of apoptosis (XIAP) siRNA
tgtatcattaatgtaatatttta

SEQ ID NO: 18143 - DNA, 23 bp, Artificial Sequence
  Description of Artificial Sequence: Synthetic oligonucleotide
  X-linked inhibitor of apoptosis (XIAP) siRNA
gtatcattaatgtaatattttaa

SEQ ID NO: 18144 - DNA, 23 bp, Artificial Sequence
  Description of Artificial Sequence: Synthetic oligonucleotide
  X-linked inhibitor of apoptosis (XIAP) siRNA
tatcattaatgtaatattttaaa

SEQ ID NO: 18145 - DNA, 23 bp, Artificial Sequence
  Description of Artificial Sequence: Synthetic oligonucleotide
  X-linked inhibitor of apoptosis (XIAP) siRNA
atcattaatgtaatattttaaat

SEQ ID NO: 18146 - DNA, 23 bp, Artificial Sequence
  Description of Artificial Sequence: Synthetic oligonucleotide
  X-linked inhibitor of apoptosis (XIAP) siRNA
tcattaatgtaatattttaaatt

SEQ ID NO: 18147 - DNA, 23 bp, Artificial Sequence
  Description of Artificial Sequence: Synthetic oligonucleotide
  X-linked inhibitor of apoptosis (XIAP) siRNA
cattaatgtaatattttaaatta

SEQ ID NO: 18148 - DNA, 23 bp, Artificial Sequence
  Description of Artificial Sequence: Synthetic oligonucleotide
  X-linked inhibitor of apoptosis (XIAP) siRNA
attaatgtaatattttaaattac

SEQ ID NO: 18149 - DNA, 23 bp, Artificial Sequence
  Description of Artificial Sequence: Synthetic oligonucleotide
  X-linked inhibitor of apoptosis (XIAP) siRNA
ttaatgtaatattttaaattact

SEQ ID NO: 18150 - DNA, 23 bp, Artificial Sequence
  Description of Artificial Sequence: Synthetic oligonucleotide
  X-linked inhibitor of apoptosis (XIAP) siRNA
taatgtaatattttaaattacta

SEQ ID NO: 18151 - DNA, 23 bp, Artificial Sequence
  Description of Artificial Sequence: Synthetic oligonucleotide
  X-linked inhibitor of apoptosis (XIAP) siRNA
aatgtaatattttaaattactat

SEQ ID NO: 18152 - DNA, 23 bp, Artificial Sequence
  Description of Artificial Sequence: Synthetic oligonucleotide
  X-linked inhibitor of apoptosis (XIAP) siRNA
atgtaatattttaaattactata

SEQ ID NO: 18153 - DNA, 23 bp, Artificial Sequence
  Description of Artificial Sequence: Synthetic oligonucleotide
  X-linked inhibitor of apoptosis (XIAP) siRNA
tgtaatattttaaattactatat

SEQ ID NO: 18154 - DNA, 23 bp, Artificial Sequence
  Description of Artificial Sequence: Synthetic oligonucleotide
  X-linked inhibitor of apoptosis (XIAP) siRNA
gtaatattttaaattactatata

SEQ ID NO: 18155 - DNA, 23 bp, Artificial Sequence
  Description of Artificial Sequence: Synthetic oligonucleotide
  X-linked inhibitor of apoptosis (XIAP) siRNA
taatattttaaattactatatat

SEQ ID NO: 18156 - DNA, 23 bp, Artificial Sequence
  Description of Artificial Sequence: Synthetic oligonucleotide
  X-linked inhibitor of apoptosis (XIAP) siRNA
aatattttaaattactatatatg

SEQ ID NO: 18157 - DNA, 23 bp, Artificial Sequence
  Description of Artificial Sequence: Synthetic oligonucleotide
  X-linked inhibitor of apoptosis (XIAP) siRNA
atattttaaattactatatatgt

SEQ ID NO: 18158 - DNA, 23 bp, Artificial Sequence
  Description of Artificial Sequence: Synthetic oligonucleotide
  X-linked inhibitor of apoptosis (XIAP) siRNA
tattttaaattactatatatgtt

SEQ ID NO: 18159 - DNA, 23 bp, Artificial Sequence
  Description of Artificial Sequence: Synthetic oligonucleotide
  X-linked inhibitor of apoptosis (XIAP) siRNA
attttaaattactatatatgtta

SEQ ID NO: 18160 - DNA, 23 bp, Artificial Sequence
  Description of Artificial Sequence: Synthetic oligonucleotide
  X-linked inhibitor of apoptosis (XIAP) siRNA
ttttaaattactatatatgttac

SEQ ID NO: 18161 - DNA, 23 bp, Artificial Sequence
  Description of Artificial Sequence: Synthetic oligonucleotide
  X-linked inhibitor of apoptosis (XIAP) siRNA
tttaaattactatatatgttacc

SEQ ID NO: 18162 - DNA, 23 bp, Artificial Sequence
  Description of Artificial Sequence: Synthetic oligonucleotide
  X-linked inhibitor of apoptosis (XIAP) siRNA
ttaaattactatatatgttacca

SEQ ID NO: 18163 - DNA, 23 bp, Artificial Sequence
  Description of Artificial Sequence: Synthetic oligonucleotide
  X-linked inhibitor of apoptosis (XIAP) siRNA
taaattactatatatgttaccat

SEQ ID NO: 18164 - DNA, 23 bp, Artificial Sequence
  Description of Artificial Sequence: Synthetic oligonucleotide
  X-linked inhibitor of apoptosis (XIAP) siRNA
aaattactatatatgttaccatt

SEQ ID NO: 18165 - DNA, 23 bp, Artificial Sequence
  Description of Artificial Sequence: Synthetic oligonucleotide
  X-linked inhibitor of apoptosis (XIAP) siRNA
aattactatatatgttaccattt

SEQ ID NO: 18166 - DNA, 23 bp, Artificial Sequence
  Description of Artificial Sequence: Synthetic oligonucleotide
  X-linked inhibitor of apoptosis (XIAP) siRNA
attactatatatgttaccatttt

SEQ ID NO: 18167 - DNA, 23 bp, Artificial Sequence
  Description of Artificial Sequence: Synthetic oligonucleotide
  X-linked inhibitor of apoptosis (XIAP) siRNA
ttactatatatgttaccattttt

SEQ ID NO: 18168 - DNA, 23 bp, Artificial Sequence
  Description of Artificial Sequence: Synthetic oligonucleotide
  X-linked inhibitor of apoptosis (XIAP) siRNA
tactatatatgttaccatttttc

SEQ ID NO: 18169 - DNA, 23 bp, Artificial Sequence
  Description of Artificial Sequence: Synthetic oligonucleotide
  X-linked inhibitor of apoptosis (XIAP) siRNA
actatatatgttaccatttttct

SEQ ID NO: 18170 - DNA, 23 bp, Artificial Sequence
  Description of Artificial Sequence: Synthetic oligonucleotide
  X-linked inhibitor of apoptosis (XIAP) siRNA
ctatatatgttaccatttttctg

SEQ ID NO: 18171 - DNA, 23 bp, Artificial Sequence
  Description of Artificial Sequence: Synthetic oligonucleotide
  X-linked inhibitor of apoptosis (XIAP) siRNA
tatatatgttaccatttttctgg

SEQ ID NO: 18172 - DNA, 23 bp, Artificial Sequence
  Description of Artificial Sequence: Synthetic oligonucleotide
  X-linked inhibitor of apoptosis (XIAP) siRNA
atatatgttaccatttttctgga

SEQ ID NO: 18173 - DNA, 23 bp, Artificial Sequence
  Description of Artificial Sequence: Synthetic oligonucleotide
  X-linked inhibitor of apoptosis (XIAP) siRNA
tatatgttaccatttttctggat

SEQ ID NO: 18174 - DNA, 23 bp, Artificial Sequence
  Description of Artificial Sequence: Synthetic oligonucleotide
  X-linked inhibitor of apoptosis (XIAP) siRNA
atatgttaccatttttctggatt

SEQ ID NO: 18175 - DNA, 23 bp, Artificial Sequence
  Description of Artificial Sequence: Synthetic oligonucleotide
  X-linked inhibitor of apoptosis (XIAP) siRNA
tatgttaccatttttctggattt

SEQ ID NO: 18176 - DNA, 23 bp, Artificial Sequence
  Description of Artificial Sequence: Synthetic oligonucleotide
  X-linked inhibitor of apoptosis (XIAP) siRNA
atgttaccatttttctggattta

SEQ ID NO: 18177 - DNA, 23 bp, Artificial Sequence
  Description of Artificial Sequence: Synthetic oligonucleotide
  X-linked inhibitor of apoptosis (XIAP) siRNA
tgttaccatttttctggatttag

SEQ ID NO: 18178 - DNA, 23 bp, Artificial Sequence
  Description of Artificial Sequence: Synthetic oligonucleotide
  X-linked inhibitor of apoptosis (XIAP) siRNA
gttaccatttttctggatttagt

SEQ ID NO: 18179 - DNA, 23 bp, Artificial Sequence
  Description of Artificial Sequence: Synthetic oligonucleotide
  X-linked inhibitor of apoptosis (XIAP) siRNA
ttaccatttttctggatttagta

SEQ ID NO: 18180 - DNA, 23 bp, Artificial Sequence
  Description of Artificial Sequence: Synthetic oligonucleotide
  X-linked inhibitor of apoptosis (XIAP) siRNA
taccatttttctggatttagtaa

SEQ ID NO: 18181 - DNA, 23 bp, Artificial Sequence
  Description of Artificial Sequence: Synthetic oligonucleotide
  X-linked inhibitor of apoptosis (XIAP) siRNA
accatttttctggatttagtaag

SEQ ID NO: 18182 - DNA, 23 bp, Artificial Sequence
  Description of Artificial Sequence: Synthetic oligonucleotide
  X-linked inhibitor of apoptosis (XIAP) siRNA
ccatttttctggatttagtaaga

SEQ ID NO: 18183 - DNA, 23 bp, Artificial Sequence
  Description of Artificial Sequence: Synthetic oligonucleotide
  X-linked inhibitor of apoptosis (XIAP) siRNA
catttttctggatttagtaagaa

SEQ ID NO: 18184 - DNA, 23 bp, Artificial Sequence
  Description of Artificial Sequence: Synthetic oligonucleotide
  X-linked inhibitor of apoptosis (XIAP) siRNA
atttttctggatttagtaagaaa

SEQ ID NO: 18185 - DNA, 23 bp, Artificial Sequence
  Description of Artificial Sequence: Synthetic oligonucleotide
  X-linked inhibitor of apoptosis (XIAP) siRNA
tttttctggatttagtaagaaat

SEQ ID NO: 18186 - DNA, 23 bp, Artificial Sequence
  Description of Artificial Sequence: Synthetic oligonucleotide
  X-linked inhibitor of apoptosis (XIAP) siRNA
ttttctggatttagtaagaaatt

SEQ ID NO: 18187 - DNA, 23 bp, Artificial Sequence
  Description of Artificial Sequence: Synthetic oligonucleotide
  X-linked inhibitor of apoptosis (XIAP) siRNA
tttctggatttagtaagaaattt

SEQ ID NO: 18188 - DNA, 23 bp, Artificial Sequence
  Description of Artificial Sequence: Synthetic oligonucleotide
  X-linked inhibitor of apoptosis (XIAP) siRNA
ttctggatttagtaagaaatttg

SEQ ID NO: 18189 - DNA, 23 bp, Artificial Sequence
  Description of Artificial Sequence: Synthetic oligonucleotide
  X-linked inhibitor of apoptosis (XIAP) siRNA
tctggatttagtaagaaatttgc

SEQ ID NO: 18190 - DNA, 23 bp, Artificial Sequence
  Description of Artificial Sequence: Synthetic oligonucleotide
  X-linked inhibitor of apoptosis (XIAP) siRNA
ctggatttagtaagaaatttgca

SEQ ID NO: 18191 - DNA, 23 bp, Artificial Sequence
  Description of Artificial Sequence: Synthetic oligonucleotide
  X-linked inhibitor of apoptosis (XIAP) siRNA
tggatttagtaagaaatttgcag

SEQ ID NO: 18192 - DNA, 23 bp, Artificial Sequence
  Description of Artificial Sequence: Synthetic oligonucleotide
  X-linked inhibitor of apoptosis (XIAP) siRNA
ggatttagtaagaaatttgcagt

SEQ ID NO: 18193 - DNA, 23 bp, Artificial Sequence
  Description of Artificial Sequence: Synthetic oligonucleotide
  X-linked inhibitor of apoptosis (XIAP) siRNA
gatttagtaagaaatttgcagtt

SEQ ID NO: 18194 - DNA, 23 bp, Artificial Sequence
  Description of Artificial Sequence: Synthetic oligonucleotide
  X-linked inhibitor of apoptosis (XIAP) siRNA
atttagtaagaaatttgcagttt

SEQ ID NO: 18195 - DNA, 23 bp, Artificial Sequence
  Description of Artificial Sequence: Synthetic oligonucleotide
  X-linked inhibitor of apoptosis (XIAP) siRNA
tttagtaagaaatttgcagtttt

SEQ ID NO: 18196 - DNA, 23 bp, Artificial Sequence
  Description of Artificial Sequence: Synthetic oligonucleotide
  X-linked inhibitor of apoptosis (XIAP) siRNA
ttagtaagaaatttgcagttttg

SEQ ID NO: 18197 - DNA, 23 bp, Artificial Sequence
  Description of Artificial Sequence: Synthetic oligonucleotide
  X-linked inhibitor of apoptosis (XIAP) siRNA
tagtaagaaatttgcagttttgg

SEQ ID NO: 18198 - DNA, 23 bp, Artificial Sequence
  Description of Artificial Sequence: Synthetic oligonucleotide
  X-linked inhibitor of apoptosis (XIAP) siRNA
agtaagaaatttgcagttttggt

SEQ ID NO: 18199 - DNA, 23 bp, Artificial Sequence
  Description of Artificial Sequence: Synthetic oligonucleotide
  X-linked inhibitor of apoptosis (XIAP) siRNA
gtaagaaatttgcagttttggtt

SEQ ID NO: 18200 - DNA, 23 bp, Artificial Sequence
  Description of Artificial Sequence: Synthetic oligonucleotide
  X-linked inhibitor of apoptosis (XIAP) siRNA
taagaaatttgcagttttggttt

SEQ ID NO: 18201 - DNA, 23 bp, Artificial Sequence
  Description of Artificial Sequence: Synthetic oligonucleotide
  X-linked inhibitor of apoptosis (XIAP) siRNA
aagaaatttgcagttttggtttg

SEQ ID NO: 18202 - DNA, 23 bp, Artificial Sequence
  Description of Artificial Sequence: Synthetic oligonucleotide
  X-linked inhibitor of apoptosis (XIAP) siRNA
agaaatttgcagttttggtttga

SEQ ID NO: 18203 - DNA, 23 bp, Artificial Sequence
  Description of Artificial Sequence: Synthetic oligonucleotide
  X-linked inhibitor of apoptosis (XIAP) siRNA
gaaatttgcagttttggtttgat

SEQ ID NO: 18204 - DNA, 23 bp, Artificial Sequence
  Description of Artificial Sequence: Synthetic oligonucleotide
  X-linked inhibitor of apoptosis (XIAP) siRNA
aaatttgcagttttggtttgatg

SEQ ID NO: 18205 - DNA, 23 bp, Artificial Sequence
  Description of Artificial Sequence: Synthetic oligonucleotide
  X-linked inhibitor of apoptosis (XIAP) siRNA
aatttgcagttttggtttgatgt

SEQ ID NO: 18206 - DNA, 23 bp, Artificial Sequence
  Description of Artificial Sequence: Synthetic oligonucleotide
  X-linked inhibitor of apoptosis (XIAP) siRNA
atttgcagttttggtttgatgta

SEQ ID NO: 18207 - DNA, 23 bp, Artificial Sequence
  Description of Artificial Sequence: Synthetic oligonucleotide
  X-linked inhibitor of apoptosis (XIAP) siRNA
tttgcagttttggtttgatgtaa

SEQ ID NO: 18208 - DNA, 23 bp, Artificial Sequence
  Description of Artificial Sequence: Synthetic oligonucleotide
  X-linked inhibitor of apoptosis (XIAP) siRNA
ttgcagttttggtttgatgtaac

SEQ ID NO: 18209 - DNA, 23 bp, Artificial Sequence
  Description of Artificial Sequence: Synthetic oligonucleotide
  X-linked inhibitor of apoptosis (XIAP) siRNA
tgcagttttggtttgatgtaaca

SEQ ID NO: 18210 - DNA, 23 bp, Artificial Sequence
  Description of Artificial Sequence: Synthetic oligonucleotide
  X-linked inhibitor of apoptosis (XIAP) siRNA
gcagttttggtttgatgtaacaa

SEQ ID NO: 18211 - DNA, 23 bp, Artificial Sequence
  Description of Artificial Sequence: Synthetic oligonucleotide
  X-linked inhibitor of apoptosis (XIAP) siRNA
cagttttggtttgatgtaacaag

SEQ ID NO: 18212 - DNA, 23 bp, Artificial Sequence
  Description of Artificial Sequence: Synthetic oligonucleotide
  X-linked inhibitor of apoptosis (XIAP) siRNA
agttttggtttgatgtaacaagg

SEQ ID NO: 18213 - DNA, 23 bp, Artificial Sequence
  Description of Artificial Sequence: Synthetic oligonucleotide
  X-linked inhibitor of apoptosis (XIAP) siRNA
gttttggtttgatgtaacaaggg

SEQ ID NO: 18214 - DNA, 23 bp, Artificial Sequence
  Description of Artificial Sequence: Synthetic oligonucleotide
  X-linked inhibitor of apoptosis (XIAP) siRNA
ttttggtttgatgtaacaagggt

SEQ ID NO: 18215 - DNA, 23 bp, Artificial Sequence
  Description of Artificial Sequence: Synthetic oligonucleotide
  X-linked inhibitor of apoptosis (XIAP) siRNA
tttggtttgatgtaacaagggtt

SEQ ID NO: 18216 - DNA, 23 bp, Artificial Sequence
  Description of Artificial Sequence: Synthetic oligonucleotide
  X-linked inhibitor of apoptosis (XIAP) siRNA
ttggtttgatgtaacaagggttt

SEQ ID NO: 18217 - DNA, 23 bp, Artificial Sequence
  Description of Artificial Sequence: Synthetic oligonucleotide
  X-linked inhibitor of apoptosis (XIAP) siRNA
tggtttgatgtaacaagggtttt

SEQ ID NO: 18218 - DNA, 23 bp, Artificial Sequence
  Description of Artificial Sequence: Synthetic oligonucleotide
  X-linked inhibitor of apoptosis (XIAP) siRNA
ggtttgatgtaacaagggtttta

SEQ ID NO: 18219 - DNA, 23 bp, Artificial Sequence
  Description of Artificial Sequence: Synthetic oligonucleotide
  X-linked inhibitor of apoptosis (XIAP) siRNA
gtttgatgtaacaagggttttaa

SEQ ID NO: 18220 - DNA, 23 bp, Artificial Sequence
  Description of Artificial Sequence: Synthetic oligonucleotide
  X-linked inhibitor of apoptosis (XIAP) siRNA
tttgatgtaacaagggttttaat

SEQ ID NO: 18221 - DNA, 23 bp, Artificial Sequence
  Description of Artificial Sequence: Synthetic oligonucleotide
  X-linked inhibitor of apoptosis (XIAP) siRNA
ttgatgtaacaagggttttaatg

SEQ ID NO: 18222 - DNA, 23 bp, Artificial Sequence
  Description of Artificial Sequence: Synthetic oligonucleotide
  X-linked inhibitor of apoptosis (XIAP) siRNA
tgatgtaacaagggttttaatgt

SEQ ID NO: 18223 - DNA, 23 bp, Artificial Sequence
  Description of Artificial Sequence: Synthetic oligonucleotide
  X-linked inhibitor of apoptosis (XIAP) siRNA
gatgtaacaagggttttaatgta

SEQ ID NO: 18224 - DNA, 23 bp, Artificial Sequence
  Description of Artificial Sequence: Synthetic oligonucleotide
  X-linked inhibitor of apoptosis (XIAP) siRNA
atgtaacaagggttttaatgtaa

SEQ ID NO: 18225 - DNA, 23 bp, Artificial Sequence
  Description of Artificial Sequence: Synthetic oligonucleotide
  X-linked inhibitor of apoptosis (XIAP) siRNA
tgtaacaagggttttaatgtaat

SEQ ID NO: 18226 - DNA, 23 bp, Artificial Sequence
  Description of Artificial Sequence: Synthetic oligonucleotide
  X-linked inhibitor of apoptosis (XIAP) siRNA
gtaacaagggttttaatgtaatt

SEQ ID NO: 18227 - DNA, 23 bp, Artificial Sequence
  Description of Artificial Sequence: Synthetic oligonucleotide
  X-linked inhibitor of apoptosis (XIAP) siRNA
taacaagggttttaatgtaattt

SEQ ID NO: 18228 - DNA, 23 bp, Artificial Sequence
  Description of Artificial Sequence: Synthetic oligonucleotide
  X-linked inhibitor of apoptosis (XIAP) siRNA
aacaagggttttaatgtaattta

SEQ ID NO: 18229 - DNA, 23 bp, Artificial Sequence
  Description of Artificial Sequence: Synthetic oligonucleotide
  X-linked inhibitor of apoptosis (XIAP) siRNA
acaagggttttaatgtaatttat

SEQ ID NO: 18230 - DNA, 23 bp, Artificial Sequence
  Description of Artificial Sequence: Synthetic oligonucleotide
  X-linked inhibitor of apoptosis (XIAP) siRNA
caagggttttaatgtaatttatg

SEQ ID NO: 18231 - DNA, 23 bp, Artificial Sequence
  Description of Artificial Sequence: Synthetic oligonucleotide
  X-linked inhibitor of apoptosis (XIAP) siRNA
aagggttttaatgtaatttatgt

SEQ ID NO: 18232 - DNA, 23 bp, Artificial Sequence
  Description of Artificial Sequence: Synthetic oligonucleotide
  X-linked inhibitor of apoptosis (XIAP) siRNA
agggttttaatgtaatttatgtt

SEQ ID NO: 18233 - DNA, 23 bp, Artificial Sequence
  Description of Artificial Sequence: Synthetic oligonucleotide
  X-linked inhibitor of apoptosis (XIAP) siRNA
gggttttaatgtaatttatgtta

SEQ ID NO: 18234 - DNA, 23 bp, Artificial Sequence
  Description of Artificial Sequence: Synthetic oligonucleotide
  X-linked inhibitor of apoptosis (XIAP) siRNA
ggttttaatgtaatttatgttag

SEQ ID NO: 18235 - DNA, 23 bp, Artificial Sequence
  Description of Artificial Sequence: Synthetic oligonucleotide
  X-linked inhibitor of apoptosis (XIAP) siRNA
gttttaatgtaatttatgttaga

SEQ ID NO: 18236 - DNA, 23 bp, Artificial Sequence
  Description of Artificial Sequence: Synthetic oligonucleotide
  X-linked inhibitor of apoptosis (XIAP) siRNA
ttttaatgtaatttatgttagat

SEQ ID NO: 18237 - DNA, 23 bp, Artificial Sequence
  Description of Artificial Sequence: Synthetic oligonucleotide
  X-linked inhibitor of apoptosis (XIAP) siRNA
tttaatgtaatttatgttagatt

SEQ ID NO: 18238 - DNA, 23 bp, Artificial Sequence
  Description of Artificial Sequence: Synthetic oligonucleotide
  X-linked inhibitor of apoptosis (XIAP) siRNA
ttaatgtaatttatgttagattt

SEQ ID NO: 18239 - DNA, 23 bp, Artificial Sequence
  Description of Artificial Sequence: Synthetic oligonucleotide
  X-linked inhibitor of apoptosis (XIAP) siRNA
taatgtaatttatgttagatttt

SEQ ID NO: 18240 - DNA, 23 bp, Artificial Sequence
  Description of Artificial Sequence: Synthetic oligonucleotide
  X-linked inhibitor of apoptosis (XIAP) siRNA
aatgtaatttatgttagattttg

SEQ ID NO: 18241 - DNA, 23 bp, Artificial Sequence
  Description of Artificial Sequence: Synthetic oligonucleotide
  X-linked inhibitor of apoptosis (XIAP) siRNA
atgtaatttatgttagattttgc

SEQ ID NO: 18242 - DNA, 23 bp, Artificial Sequence
  Description of Artificial Sequence: Synthetic oligonucleotide
  X-linked inhibitor of apoptosis (XIAP) siRNA
tgtaatttatgttagattttgca

SEQ ID NO: 18243 - DNA, 23 bp, Artificial Sequence
  Description of Artificial Sequence: Synthetic oligonucleotide
  X-linked inhibitor of apoptosis (XIAP) siRNA
gtaatttatgttagattttgcat

SEQ ID NO: 18244 - DNA, 23 bp, Artificial Sequence
  Description of Artificial Sequence: Synthetic oligonucleotide
  X-linked inhibitor of apoptosis (XIAP) siRNA
taatttatgttagattttgcatt

SEQ ID NO: 18245 - DNA, 23 bp, Artificial Sequence
  Description of Artificial Sequence: Synthetic oligonucleotide
  X-linked inhibitor of apoptosis (XIAP) siRNA
aatttatgttagattttgcattt

SEQ ID NO: 18246 - DNA, 23 bp, Artificial Sequence
  Description of Artificial Sequence: Synthetic oligonucleotide
  X-linked inhibitor of apoptosis (XIAP) siRNA
atttatgttagattttgcatttt

SEQ ID NO: 18247 - DNA, 23 bp, Artificial Sequence
  Description of Artificial Sequence: Synthetic oligonucleotide
  X-linked inhibitor of apoptosis (XIAP) siRNA
tttatgttagattttgcattttt

SEQ ID NO: 18248 - DNA, 23 bp, Artificial Sequence
  Description of Artificial Sequence: Synthetic oligonucleotide
  X-linked inhibitor of apoptosis (XIAP) siRNA
ttatgttagattttgcatttttt

SEQ ID NO: 18249 - DNA, 23 bp, Artificial Sequence
  Description of Artificial Sequence: Synthetic oligonucleotide
  X-linked inhibitor of apoptosis (XIAP) siRNA
tatgttagattttgcattttttt

SEQ ID NO: 18250 - DNA, 23 bp, Artificial Sequence
  Description of Artificial Sequence: Synthetic oligonucleotide
  X-linked inhibitor of apoptosis (XIAP) siRNA
atgttagattttgcatttttttc

SEQ ID NO: 18251 - DNA, 23 bp, Artificial Sequence
  Description of Artificial Sequence: Synthetic oligonucleotide
  X-linked inhibitor of apoptosis (XIAP) siRNA
tgttagattttgcatttttttca

SEQ ID NO: 18252 - DNA, 23 bp, Artificial Sequence
  Description of Artificial Sequence: Synthetic oligonucleotide
  X-linked inhibitor of apoptosis (XIAP) siRNA
gttagattttgcatttttttcat

SEQ ID NO: 18253 - DNA, 23 bp, Artificial Sequence
  Description of Artificial Sequence: Synthetic oligonucleotide
  X-linked inhibitor of apoptosis (XIAP) siRNA
ttagattttgcatttttttcatt

SEQ ID NO: 18254 - DNA, 23 bp, Artificial Sequence
  Description of Artificial Sequence: Synthetic oligonucleotide
  X-linked inhibitor of apoptosis (XIAP) siRNA
tagattttgcatttttttcatta

SEQ ID NO: 18255 - DNA, 23 bp, Artificial Sequence
  Description of Artificial Sequence: Synthetic oligonucleotide
  X-linked inhibitor of apoptosis (XIAP) siRNA
agattttgcatttttttcattac

SEQ ID NO: 18256 - DNA, 23 bp, Artificial Sequence
  Description of Artificial Sequence: Synthetic oligonucleotide
  X-linked inhibitor of apoptosis (XIAP) siRNA
gattttgcatttttttcattact

SEQ ID NO: 18257 - DNA, 23 bp, Artificial Sequence
  Description of Artificial Sequence: Synthetic oligonucleotide
  X-linked inhibitor of apoptosis (XIAP) siRNA
attttgcatttttttcattactg

SEQ ID NO: 18258 - DNA, 23 bp, Artificial Sequence
  Description of Artificial Sequence: Synthetic oligonucleotide
  X-linked inhibitor of apoptosis (XIAP) siRNA
ttttgcatttttttcattactgt

SEQ ID NO: 18259 - DNA, 23 bp, Artificial Sequence
  Description of Artificial Sequence: Synthetic oligonucleotide
  X-linked inhibitor of apoptosis (XIAP) siRNA
tttgcatttttttcattactgtt

SEQ ID NO: 18260 - DNA, 23 bp, Artificial Sequence
  Description of Artificial Sequence: Synthetic oligonucleotide
  X-linked inhibitor of apoptosis (XIAP) siRNA
ttgcatttttttcattactgtta

SEQ ID NO: 18261 - DNA, 23 bp, Artificial Sequence
  Description of Artificial Sequence: Synthetic oligonucleotide
  X-linked inhibitor of apoptosis (XIAP) siRNA
tgcatttttttcattactgttat

SEQ ID NO: 18262 - DNA, 23 bp, Artificial Sequence
  Description of Artificial Sequence: Synthetic oligonucleotide
  X-linked inhibitor of apoptosis (XIAP) siRNA
gcatttttttcattactgttata

SEQ ID NO: 18263 - DNA, 23 bp, Artificial Sequence
  Description of Artificial Sequence: Synthetic oligonucleotide
  X-linked inhibitor of apoptosis (XIAP) siRNA
catttttttcattactgttatat

SEQ ID NO: 18264 - DNA, 23 bp, Artificial Sequence
  Description of Artificial Sequence: Synthetic oligonucleotide
  X-linked inhibitor of apoptosis (XIAP) siRNA
atttttttcattactgttatatt

SEQ ID NO: 18265 - DNA, 23 bp, Artificial Sequence
  Description of Artificial Sequence: Synthetic oligonucleotide
  X-linked inhibitor of apoptosis (XIAP) siRNA
tttttttcattactgttatattt

SEQ ID NO: 18266 - DNA, 23 bp, Artificial Sequence
  Description of Artificial Sequence: Synthetic oligonucleotide
  X-linked inhibitor of apoptosis (XIAP) siRNA
ttttttcattactgttatatttt

SEQ ID NO: 18267 - DNA, 23 bp, Artificial Sequence
  Description of Artificial Sequence: Synthetic oligonucleotide
  X-linked inhibitor of apoptosis (XIAP) siRNA
tttttcattactgttatatttta

SEQ ID NO: 18268 - DNA, 23 bp, Artificial Sequence
  Description of Artificial Sequence: Synthetic oligonucleotide
  X-linked inhibitor of apoptosis (XIAP) siRNA
ttttcattactgttatattttaa

SEQ ID NO: 18269 - DNA, 23 bp, Artificial Sequence
  Description of Artificial Sequence: Synthetic oligonucleotide
  X-linked inhibitor of apoptosis (XIAP) siRNA
tttcattactgttatattttaac

SEQ ID NO: 18270 - DNA, 23 bp, Artificial Sequence
  Description of Artificial Sequence: Synthetic oligonucleotide
  X-linked inhibitor of apoptosis (XIAP) siRNA
ttcattactgttatattttaacc

SEQ ID NO: 18271 - DNA, 23 bp, Artificial Sequence
  Description of Artificial Sequence: Synthetic oligonucleotide
  X-linked inhibitor of apoptosis (XIAP) siRNA
tcattactgttatattttaacct

SEQ ID NO: 18272 - DNA, 23 bp, Artificial Sequence
  Description of Artificial Sequence: Synthetic oligonucleotide
  X-linked inhibitor of apoptosis (XIAP) siRNA
cattactgttatattttaacctg

SEQ ID NO: 18273 - DNA, 23 bp, Artificial Sequence
  Description of Artificial Sequence: Synthetic oligonucleotide
  X-linked inhibitor of apoptosis (XIAP) siRNA
attactgttatattttaacctga

SEQ ID NO: 18274 - DNA, 23 bp, Artificial Sequence
  Description of Artificial Sequence: Synthetic oligonucleotide
  X-linked inhibitor of apoptosis (XIAP) siRNA
ttactgttatattttaacctgac

SEQ ID NO: 18275 - DNA, 23 bp, Artificial Sequence
  Description of Artificial Sequence: Synthetic oligonucleotide
  X-linked inhibitor of apoptosis (XIAP) siRNA
tactgttatattttaacctgact

SEQ ID NO: 18276 - DNA, 23 bp, Artificial Sequence
  Description of Artificial Sequence: Synthetic oligonucleotide
  X-linked inhibitor of apoptosis (XIAP) siRNA
actgttatattttaacctgactg

SEQ ID NO: 18277 - DNA, 23 bp, Artificial Sequence
  Description of Artificial Sequence: Synthetic oligonucleotide
  X-linked inhibitor of apoptosis (XIAP) siRNA
ctgttatattttaacctgactga

SEQ ID NO: 18278 - DNA, 23 bp, Artificial Sequence
  Description of Artificial Sequence: Synthetic oligonucleotide
  X-linked inhibitor of apoptosis (XIAP) siRNA
tgttatattttaacctgactgac

SEQ ID NO: 18279 - DNA, 23 bp, Artificial Sequence
  Description of Artificial Sequence: Synthetic oligonucleotide
  X-linked inhibitor of apoptosis (XIAP) siRNA
gttatattttaacctgactgact

SEQ ID NO: 18280 - DNA, 23 bp, Artificial Sequence
  Description of Artificial Sequence: Synthetic oligonucleotide
  X-linked inhibitor of apoptosis (XIAP) siRNA
ttatattttaacctgactgactg

SEQ ID NO: 18281 - DNA, 23 bp, Artificial Sequence
  Description of Artificial Sequence: Synthetic oligonucleotide
  X-linked inhibitor of apoptosis (XIAP) siRNA
tatattttaacctgactgactga

SEQ ID NO: 18282 - DNA, 23 bp, Artificial Sequence
  Description of Artificial Sequence: Synthetic oligonucleotide
  X-linked inhibitor of apoptosis (XIAP) siRNA
atattttaacctgactgactgat

SEQ ID NO: 18283 - DNA, 23 bp, Artificial Sequence
  Description of Artificial Sequence: Synthetic oligonucleotide
  X-linked inhibitor of apoptosis (XIAP) siRNA
tattttaacctgactgactgatc

SEQ ID NO: 18284 - DNA, 23 bp, Artificial Sequence
  Description of Artificial Sequence: Synthetic oligonucleotide
  X-linked inhibitor of apoptosis (XIAP) siRNA
attttaacctgactgactgatct

SEQ ID NO: 18285 - DNA, 23 bp, Artificial Sequence
  Description of Artificial Sequence: Synthetic oligonucleotide
  X-linked inhibitor of apoptosis (XIAP) siRNA
ttttaacctgactgactgatcta

SEQ ID NO: 18286 - DNA, 23 bp, Artificial Sequence
  Description of Artificial Sequence: Synthetic oligonucleotide
  X-linked inhibitor of apoptosis (XIAP) siRNA
tttaacctgactgactgatctaa

SEQ ID NO: 18287 - DNA, 23 bp, Artificial Sequence
  Description of Artificial Sequence: Synthetic oligonucleotide
  X-linked inhibitor of apoptosis (XIAP) siRNA
ttaacctgactgactgatctaat

SEQ ID NO: 18288 - DNA, 23 bp, Artificial Sequence
  Description of Artificial Sequence: Synthetic oligonucleotide
  X-linked inhibitor of apoptosis (XIAP) siRNA
taacctgactgactgatctaatt

SEQ ID NO: 18289 - DNA, 23 bp, Artificial Sequence
  Description of Artificial Sequence: Synthetic oligonucleotide
  X-linked inhibitor of apoptosis (XIAP) siRNA
aacctgactgactgatctaattg

SEQ ID NO: 18290 - DNA, 23 bp, Artificial Sequence
  Description of Artificial Sequence: Synthetic oligonucleotide
  X-linked inhibitor of apoptosis (XIAP) siRNA
acctgactgactgatctaattgt

SEQ ID NO: 18291 - DNA, 23 bp, Artificial Sequence
  Description of Artificial Sequence: Synthetic oligonucleotide
  X-linked inhibitor of apoptosis (XIAP) siRNA
cctgactgactgatctaattgta

SEQ ID NO: 18292 - DNA, 23 bp, Artificial Sequence
  Description of Artificial Sequence: Synthetic oligonucleotide
  X-linked inhibitor of apoptosis (XIAP) siRNA
ctgactgactgatctaattgtat

SEQ ID NO: 18293 - DNA, 23 bp, Artificial Sequence
  Description of Artificial Sequence: Synthetic oligonucleotide
  X-linked inhibitor of apoptosis (XIAP) siRNA
tgactgactgatctaattgtatt

SEQ ID NO: 18294 - DNA, 23 bp, Artificial Sequence
  Description of Artificial Sequence: Synthetic oligonucleotide
  X-linked inhibitor of apoptosis (XIAP) siRNA
gactgactgatctaattgtatta

SEQ ID NO: 18295 - DNA, 23 bp, Artificial Sequence
  Description of Artificial Sequence: Synthetic oligonucleotide
  X-linked inhibitor of apoptosis (XIAP) siRNA
actgactgatctaattgtattag

SEQ ID NO: 18296 - DNA, 23 bp, Artificial Sequence
  Description of Artificial Sequence: Synthetic oligonucleotide
  X-linked inhibitor of apoptosis (XIAP) siRNA
ctgactgatctaattgtattagt

SEQ ID NO: 18297 - DNA, 23 bp, Artificial Sequence
  Description of Artificial Sequence: Synthetic oligonucleotide
  X-linked inhibitor of apoptosis (XIAP) siRNA
tgactgatctaattgtattagta

SEQ ID NO: 18298 - DNA, 23 bp, Artificial Sequence
  Description of Artificial Sequence: Synthetic oligonucleotide
  X-linked inhibitor of apoptosis (XIAP) siRNA
gactgatctaattgtattagtat

SEQ ID NO: 18299 - DNA, 23 bp, Artificial Sequence
  Description of Artificial Sequence: Synthetic oligonucleotide
  X-linked inhibitor of apoptosis (XIAP) siRNA
actgatctaattgtattagtatt

SEQ ID NO: 18300 - DNA, 23 bp, Artificial Sequence
  Description of Artificial Sequence: Synthetic oligonucleotide
  X-linked inhibitor of apoptosis (XIAP) siRNA
ctgatctaattgtattagtattg

SEQ ID NO: 18301 - DNA, 23 bp, Artificial Sequence
  Description of Artificial Sequence: Synthetic oligonucleotide
  X-linked inhibitor of apoptosis (XIAP) siRNA
tgatctaattgtattagtattgt

SEQ ID NO: 18302 - DNA, 23 bp, Artificial Sequence
  Description of Artificial Sequence: Synthetic oligonucleotide
  X-linked inhibitor of apoptosis (XIAP) siRNA
gatctaattgtattagtattgtg

SEQ ID NO: 18303 - DNA, 23 bp, Artificial Sequence
  Description of Artificial Sequence: Synthetic oligonucleotide
  X-linked inhibitor of apoptosis (XIAP) siRNA
atctaattgtattagtattgtga

SEQ ID NO: 18304 - DNA, 23 bp, Artificial Sequence
  Description of Artificial Sequence: Synthetic oligonucleotide
  X-linked inhibitor of apoptosis (XIAP) siRNA
tctaattgtattagtattgtgaa

SEQ ID NO: 18305 - DNA, 23 bp, Artificial Sequence
  Description of Artificial Sequence: Synthetic oligonucleotide
  X-linked inhibitor of apoptosis (XIAP) siRNA
ctaattgtattagtattgtgaat

SEQ ID NO: 18306 - DNA, 23 bp, Artificial Sequence
  Description of Artificial Sequence: Synthetic oligonucleotide
  X-linked inhibitor of apoptosis (XIAP) siRNA
taattgtattagtattgtgaata

SEQ ID NO: 18307 - DNA, 23 bp, Artificial Sequence
  Description of Artificial Sequence: Synthetic oligonucleotide
  X-linked inhibitor of apoptosis (XIAP) siRNA
aattgtattagtattgtgaataa

SEQ ID NO: 18308 - DNA, 23 bp, Artificial Sequence
  Description of Artificial Sequence: Synthetic oligonucleotide
  X-linked inhibitor of apoptosis (XIAP) siRNA
attgtattagtattgtgaataat

SEQ ID NO: 18309 - DNA, 23 bp, Artificial Sequence
  Description of Artificial Sequence: Synthetic oligonucleotide
  X-linked inhibitor of apoptosis (XIAP) siRNA
ttgtattagtattgtgaataatc

SEQ ID NO: 18310 - DNA, 23 bp, Artificial Sequence
  Description of Artificial Sequence: Synthetic oligonucleotide
  X-linked inhibitor of apoptosis (XIAP) siRNA
tgtattagtattgtgaataatca

SEQ ID NO: 18311 - DNA, 23 bp, Artificial Sequence
  Description of Artificial Sequence: Synthetic oligonucleotide
  X-linked inhibitor of apoptosis (XIAP) siRNA
gtattagtattgtgaataatcat

SEQ ID NO: 18312 - DNA, 23 bp, Artificial Sequence
  Description of Artificial Sequence: Synthetic oligonucleotide
  X-linked inhibitor of apoptosis (XIAP) siRNA
tattagtattgtgaataatcatg

SEQ ID NO: 18313 - DNA, 23 bp, Artificial Sequence
  Description of Artificial Sequence: Synthetic oligonucleotide
  X-linked inhibitor of apoptosis (XIAP) siRNA
attagtattgtgaataatcatgt

SEQ ID NO: 18314 - DNA, 23 bp, Artificial Sequence
  Description of Artificial Sequence: Synthetic oligonucleotide
  X-linked inhibitor of apoptosis (XIAP) siRNA
ttagtattgtgaataatcatgtg

SEQ ID NO: 18315 - DNA, 23 bp, Artificial Sequence
  Description of Artificial Sequence: Synthetic oligonucleotide
  X-linked inhibitor of apoptosis (XIAP) siRNA
tagtattgtgaataatcatgtga

SEQ ID NO: 18316 - DNA, 23 bp, Artificial Sequence
  Description of Artificial Sequence: Synthetic oligonucleotide
  X-linked inhibitor of apoptosis (XIAP) siRNA
agtattgtgaataatcatgtgaa

SEQ ID NO: 18317 - DNA, 23 bp, Artificial Sequence
  Description of Artificial Sequence: Synthetic oligonucleotide
  X-linked inhibitor of apoptosis (XIAP) siRNA
gtattgtgaataatcatgtgaaa

SEQ ID NO: 18318 - DNA, 23 bp, Artificial Sequence
  Description of Artificial Sequence: Synthetic oligonucleotide
  X-linked inhibitor of apoptosis (XIAP) siRNA
tattgtgaataatcatgtgaaat

SEQ ID NO: 18319 - DNA, 23 bp, Artificial Sequence
  Description of Artificial Sequence: Synthetic oligonucleotide
  X-linked inhibitor of apoptosis (XIAP) siRNA
attgtgaataatcatgtgaaatg

SEQ ID NO: 18320 - DNA, 23 bp, Artificial Sequence
  Description of Artificial Sequence: Synthetic oligonucleotide
  X-linked inhibitor of apoptosis (XIAP) siRNA
ttgtgaataatcatgtgaaatgt

SEQ ID NO: 18321 - DNA, 23 bp, Artificial Sequence
  Description of Artificial Sequence: Synthetic oligonucleotide
  X-linked inhibitor of apoptosis (XIAP) siRNA
tgtgaataatcatgtgaaatgtt

SEQ ID NO: 18322 - DNA, 23 bp, Artificial Sequence
  Description of Artificial Sequence: Synthetic oligonucleotide
  X-linked inhibitor of apoptosis (XIAP) siRNA
gtgaataatcatgtgaaatgttt

SEQ ID NO: 18323 - DNA, 23 bp, Artificial Sequence
  Description of Artificial Sequence: Synthetic oligonucleotide
  X-linked inhibitor of apoptosis (XIAP) siRNA
tgaataatcatgtgaaatgtttt

SEQ ID NO: 18324 - DNA, 23 bp, Artificial Sequence
  Description of Artificial Sequence: Synthetic oligonucleotide
  X-linked inhibitor of apoptosis (XIAP) siRNA
gaataatcatgtgaaatgttttg

SEQ ID NO: 18325 - DNA, 23 bp, Artificial Sequence
  Description of Artificial Sequence: Synthetic oligonucleotide
  X-linked inhibitor of apoptosis (XIAP) siRNA
aataatcatgtgaaatgttttga

SEQ ID NO: 18326 - DNA, 23 bp, Artificial Sequence
  Description of Artificial Sequence: Synthetic oligonucleotide
  X-linked inhibitor of apoptosis (XIAP) siRNA
ataatcatgtgaaatgttttgag

SEQ ID NO: 18327 - DNA, 23 bp, Artificial Sequence
  Description of Artificial Sequence: Synthetic oligonucleotide
  X-linked inhibitor of apoptosis (XIAP) siRNA
taatcatgtgaaatgttttgaga

SEQ ID NO: 18328 - DNA, 23 bp, Artificial Sequence
  Description of Artificial Sequence: Synthetic oligonucleotide
  X-linked inhibitor of apoptosis (XIAP) siRNA
aatcatgtgaaatgttttgagac

SEQ ID NO: 18329 - DNA, 23 bp, Artificial Sequence
  Description of Artificial Sequence: Synthetic oligonucleotide
  X-linked inhibitor of apoptosis (XIAP) siRNA
atcatgtgaaatgttttgagaca

SEQ ID NO: 18330 - DNA, 23 bp, Artificial Sequence
  Description of Artificial Sequence: Synthetic oligonucleotide
  X-linked inhibitor of apoptosis (XIAP) siRNA
tcatgtgaaatgttttgagacag

SEQ ID NO: 18331 - DNA, 23 bp, Artificial Sequence
  Description of Artificial Sequence: Synthetic oligonucleotide
  X-linked inhibitor of apoptosis (XIAP) siRNA
catgtgaaatgttttgagacaga

SEQ ID NO: 18332 - DNA, 23 bp, Artificial Sequence
  Description of Artificial Sequence: Synthetic oligonucleotide
  X-linked inhibitor of apoptosis (XIAP) siRNA
atgtgaaatgttttgagacagag

SEQ ID NO: 18333 - DNA, 23 bp, Artificial Sequence
  Description of Artificial Sequence: Synthetic oligonucleotide
  X-linked inhibitor of apoptosis (XIAP) siRNA
tgtgaaatgttttgagacagagt

SEQ ID NO: 18334 - DNA, 23 bp, Artificial Sequence
  Description of Artificial Sequence: Synthetic oligonucleotide
  X-linked inhibitor of apoptosis (XIAP) siRNA
gtgaaatgttttgagacagagta

SEQ ID NO: 18335 - DNA, 23 bp, Artificial Sequence
  Description of Artificial Sequence: Synthetic oligonucleotide
  X-linked inhibitor of apoptosis (XIAP) siRNA
tgaaatgttttgagacagagtac

SEQ ID NO: 18336 - DNA, 23 bp, Artificial Sequence
  Description of Artificial Sequence: Synthetic oligonucleotide
  X-linked inhibitor of apoptosis (XIAP) siRNA
gaaatgttttgagacagagtact

SEQ ID NO: 18337 - DNA, 23 bp, Artificial Sequence
  Description of Artificial Sequence: Synthetic oligonucleotide
  X-linked inhibitor of apoptosis (XIAP) siRNA
aaatgttttgagacagagtacta

SEQ ID NO: 18338 - DNA, 23 bp, Artificial Sequence
  Description of Artificial Sequence: Synthetic oligonucleotide
  X-linked inhibitor of apoptosis (XIAP) siRNA
aatgttttgagacagagtactat

SEQ ID NO: 18339 - DNA, 23 bp, Artificial Sequence
  Description of Artificial Sequence: Synthetic oligonucleotide
  X-linked inhibitor of apoptosis (XIAP) siRNA
atgttttgagacagagtactata

SEQ ID NO: 18340 - DNA, 23 bp, Artificial Sequence
  Description of Artificial Sequence: Synthetic oligonucleotide
  X-linked inhibitor of apoptosis (XIAP) siRNA
tgttttgagacagagtactatat

SEQ ID NO: 18341 - DNA, 23 bp, Artificial Sequence
  Description of Artificial Sequence: Synthetic oligonucleotide
  X-linked inhibitor of apoptosis (XIAP) siRNA
gttttgagacagagtactatatt

SEQ ID NO: 18342 - DNA, 23 bp, Artificial Sequence
  Description of Artificial Sequence: Synthetic oligonucleotide
  X-linked inhibitor of apoptosis (XIAP) siRNA
ttttgagacagagtactatattt

SEQ ID NO: 18343 - DNA, 23 bp, Artificial Sequence
  Description of Artificial Sequence: Synthetic oligonucleotide
  X-linked inhibitor of apoptosis (XIAP) siRNA
tttgagacagagtactatatttg

SEQ ID NO: 18344 - DNA, 23 bp, Artificial Sequence
  Description of Artificial Sequence: Synthetic oligonucleotide
  X-linked inhibitor of apoptosis (XIAP) siRNA
ttgagacagagtactatatttgt

SEQ ID NO: 18345 - DNA, 23 bp, Artificial Sequence
  Description of Artificial Sequence: Synthetic oligonucleotide
  X-linked inhibitor of apoptosis (XIAP) siRNA
tgagacagagtactatatttgtg

SEQ ID NO: 18346 - DNA, 23 bp, Artificial Sequence
  Description of Artificial Sequence: Synthetic oligonucleotide
  X-linked inhibitor of apoptosis (XIAP) siRNA
gagacagagtactatatttgtga

SEQ ID NO: 18347 - DNA, 23 bp, Artificial Sequence
  Description of Artificial Sequence: Synthetic oligonucleotide
  X-linked inhibitor of apoptosis (XIAP) siRNA
agacagagtactatatttgtgaa

SEQ ID NO: 18348 - DNA, 23 bp, Artificial Sequence
  Description of Artificial Sequence: Synthetic oligonucleotide
  X-linked inhibitor of apoptosis (XIAP) siRNA
gacagagtactatatttgtgaat

SEQ ID NO: 18349 - DNA, 23 bp, Artificial Sequence
  Description of Artificial Sequence: Synthetic oligonucleotide
  X-linked inhibitor of apoptosis (XIAP) siRNA
acagagtactatatttgtgaata

SEQ ID NO: 18350 - DNA, 23 bp, Artificial Sequence
  Description of Artificial Sequence: Synthetic oligonucleotide
  X-linked inhibitor of apoptosis (XIAP) siRNA
cagagtactatatttgtgaatat

SEQ ID NO: 18351 - DNA, 23 bp, Artificial Sequence
  Description of Artificial Sequence: Synthetic oligonucleotide
  X-linked inhibitor of apoptosis (XIAP) siRNA
agagtactatatttgtgaatata

SEQ ID NO: 18352 - DNA, 23 bp, Artificial Sequence
  Description of Artificial Sequence: Synthetic oligonucleotide
  X-linked inhibitor of apoptosis (XIAP) siRNA
gagtactatatttgtgaatataa

SEQ ID NO: 18353 - DNA, 23 bp, Artificial Sequence
  Description of Artificial Sequence: Synthetic oligonucleotide
  X-linked inhibitor of apoptosis (XIAP) siRNA
agtactatatttgtgaatataat

SEQ ID NO: 18354 - DNA, 23 bp, Artificial Sequence
  Description of Artificial Sequence: Synthetic oligonucleotide
  X-linked inhibitor of apoptosis (XIAP) siRNA
gtactatatttgtgaatataatt

SEQ ID NO: 18355 - DNA, 23 bp, Artificial Sequence
  Description of Artificial Sequence: Synthetic oligonucleotide
  X-linked inhibitor of apoptosis (XIAP) siRNA
tactatatttgtgaatataattt

SEQ ID NO: 18356 - DNA, 23 bp, Artificial Sequence
  Description of Artificial Sequence: Synthetic oligonucleotide
  X-linked inhibitor of apoptosis (XIAP) siRNA
actatatttgtgaatataatttt

SEQ ID NO: 18357 - DNA, 23 bp, Artificial Sequence
  Description of Artificial Sequence: Synthetic oligonucleotide
  X-linked inhibitor of apoptosis (XIAP) siRNA
ctatatttgtgaatataatttta

SEQ ID NO: 18358 - DNA, 23 bp, Artificial Sequence
  Description of Artificial Sequence: Synthetic oligonucleotide
  X-linked inhibitor of apoptosis (XIAP) siRNA
tatatttgtgaatataattttat

SEQ ID NO: 18359 - DNA, 23 bp, Artificial Sequence
  Description of Artificial Sequence: Synthetic oligonucleotide
  X-linked inhibitor of apoptosis (XIAP) siRNA
atatttgtgaatataattttatg

SEQ ID NO: 18360 - DNA, 23 bp, Artificial Sequence
  Description of Artificial Sequence: Synthetic oligonucleotide
  X-linked inhibitor of apoptosis (XIAP) siRNA
tatttgtgaatataattttatgg

SEQ ID NO: 18361 - DNA, 23 bp, Artificial Sequence
  Description of Artificial Sequence: Synthetic oligonucleotide
  X-linked inhibitor of apoptosis (XIAP) siRNA
atttgtgaatataattttatggt

SEQ ID NO: 18362 - DNA, 23 bp, Artificial Sequence
  Description of Artificial Sequence: Synthetic oligonucleotide
  X-linked inhibitor of apoptosis (XIAP) siRNA
tttgtgaatataattttatggtt

SEQ ID NO: 18363 - DNA, 23 bp, Artificial Sequence
  Description of Artificial Sequence: Synthetic oligonucleotide
  X-linked inhibitor of apoptosis (XIAP) siRNA
ttgtgaatataattttatggttt

SEQ ID NO: 18364 - DNA, 23 bp, Artificial Sequence
  Description of Artificial Sequence: Synthetic oligonucleotide
  X-linked inhibitor of apoptosis (XIAP) siRNA
tgtgaatataattttatggtttt

SEQ ID NO: 18365 - DNA, 23 bp, Artificial Sequence
  Description of Artificial Sequence: Synthetic oligonucleotide
  X-linked inhibitor of apoptosis (XIAP) siRNA
gtgaatataattttatggttttt

SEQ ID NO: 18366 - DNA, 23 bp, Artificial Sequence
  Description of Artificial Sequence: Synthetic oligonucleotide
  X-linked inhibitor of apoptosis (XIAP) siRNA
tgaatataattttatggtttttt

SEQ ID NO: 18367 - DNA, 23 bp, Artificial Sequence
  Description of Artificial Sequence: Synthetic oligonucleotide
  X-linked inhibitor of apoptosis (XIAP) siRNA
gaatataattttatggttttttt

SEQ ID NO: 18368 - DNA, 23 bp, Artificial Sequence
  Description of Artificial Sequence: Synthetic oligonucleotide
  X-linked inhibitor of apoptosis (XIAP) siRNA
aatataattttatggtttttttc

SEQ ID NO: 18369 - DNA, 23 bp, Artificial Sequence
  Description of Artificial Sequence: Synthetic oligonucleotide
  X-linked inhibitor of apoptosis (XIAP) siRNA
atataattttatggtttttttca

SEQ ID NO: 18370 - DNA, 23 bp, Artificial Sequence
  Description of Artificial Sequence: Synthetic oligonucleotide
  X-linked inhibitor of apoptosis (XIAP) siRNA
tataattttatggtttttttcac

SEQ ID NO: 18371 - DNA, 23 bp, Artificial Sequence
  Description of Artificial Sequence: Synthetic oligonucleotide
  X-linked inhibitor of apoptosis (XIAP) siRNA
ataattttatggtttttttcact

SEQ ID NO: 18372 - DNA, 23 bp, Artificial Sequence
  Description of Artificial Sequence: Synthetic oligonucleotide
  X-linked inhibitor of apoptosis (XIAP) siRNA
taattttatggtttttttcactt

SEQ ID NO: 18373 - DNA, 23 bp, Artificial Sequence
  Description of Artificial Sequence: Synthetic oligonucleotide
  X-linked inhibitor of apoptosis (XIAP) siRNA
aattttatggtttttttcactta

SEQ ID NO: 18374 - DNA, 23 bp, Artificial Sequence
  Description of Artificial Sequence: Synthetic oligonucleotide
  X-linked inhibitor of apoptosis (XIAP) siRNA
attttatggtttttttcacttag

SEQ ID NO: 18375 - DNA, 23 bp, Artificial Sequence
  Description of Artificial Sequence: Synthetic oligonucleotide
  X-linked inhibitor of apoptosis (XIAP) siRNA
ttttatggtttttttcacttaga

SEQ ID NO: 18376 - DNA, 23 bp, Artificial Sequence
  Description of Artificial Sequence: Synthetic oligonucleotide
  X-linked inhibitor of apoptosis (XIAP) siRNA
tttatggtttttttcacttagaa

SEQ ID NO: 18377 - DNA, 23 bp, Artificial Sequence
  Description of Artificial Sequence: Synthetic oligonucleotide
  X-linked inhibitor of apoptosis (XIAP) siRNA
ttatggtttttttcacttagaac

SEQ ID NO: 18378 - DNA, 23 bp, Artificial Sequence
  Description of Artificial Sequence: Synthetic oligonucleotide
  X-linked inhibitor of apoptosis (XIAP) siRNA
tatggtttttttcacttagaacc

SEQ ID NO: 18379 - DNA, 23 bp, Artificial Sequence
  Description of Artificial Sequence: Synthetic oligonucleotide
  X-linked inhibitor of apoptosis (XIAP) siRNA
atggtttttttcacttagaacct

SEQ ID NO: 18380 - DNA, 23 bp, Artificial Sequence
  Description of Artificial Sequence: Synthetic oligonucleotide
  X-linked inhibitor of apoptosis (XIAP) siRNA
tggtttttttcacttagaacctt

SEQ ID NO: 18381 - DNA, 23 bp, Artificial Sequence
  Description of Artificial Sequence: Synthetic oligonucleotide
  X-linked inhibitor of apoptosis (XIAP) siRNA
ggtttttttcacttagaaccttt

SEQ ID NO: 18382 - DNA, 23 bp, Artificial Sequence
  Description of Artificial Sequence: Synthetic oligonucleotide
  X-linked inhibitor of apoptosis (XIAP) siRNA
gtttttttcacttagaacctttc

SEQ ID NO: 18383 - DNA, 23 bp, Artificial Sequence
  Description of Artificial Sequence: Synthetic oligonucleotide
  X-linked inhibitor of apoptosis (XIAP) siRNA
tttttttcacttagaacctttct

SEQ ID NO: 18384 - DNA, 23 bp, Artificial Sequence
  Description of Artificial Sequence: Synthetic oligonucleotide
  X-linked inhibitor of apoptosis (XIAP) siRNA
ttttttcacttagaacctttctg

SEQ ID NO: 18385 - DNA, 23 bp, Artificial Sequence
  Description of Artificial Sequence: Synthetic oligonucleotide
  X-linked inhibitor of apoptosis (XIAP) siRNA
tttttcacttagaacctttctgt

SEQ ID NO: 18386 - DNA, 23 bp, Artificial Sequence
  Description of Artificial Sequence: Synthetic oligonucleotide
  X-linked inhibitor of apoptosis (XIAP) siRNA
ttttcacttagaacctttctgtg

SEQ ID NO: 18387 - DNA, 23 bp, Artificial Sequence
  Description of Artificial Sequence: Synthetic oligonucleotide
  X-linked inhibitor of apoptosis (XIAP) siRNA
tttcacttagaacctttctgtgt

SEQ ID NO: 18388 - DNA, 23 bp, Artificial Sequence
  Description of Artificial Sequence: Synthetic oligonucleotide
  X-linked inhibitor of apoptosis (XIAP) siRNA
ttcacttagaacctttctgtgtg

SEQ ID NO: 18389 - DNA, 23 bp, Artificial Sequence
  Description of Artificial Sequence: Synthetic oligonucleotide
  X-linked inhibitor of apoptosis (XIAP) siRNA
tcacttagaacctttctgtgtgg

SEQ ID NO: 18390 - DNA, 23 bp, Artificial Sequence
  Description of Artificial Sequence: Synthetic oligonucleotide
  X-linked inhibitor of apoptosis (XIAP) siRNA
cacttagaacctttctgtgtgga

SEQ ID NO: 18391 - DNA, 23 bp, Artificial Sequence
  Description of Artificial Sequence: Synthetic oligonucleotide
  X-linked inhibitor of apoptosis (XIAP) siRNA
acttagaacctttctgtgtggaa

SEQ ID NO: 18392 - DNA, 23 bp, Artificial Sequence
  Description of Artificial Sequence: Synthetic oligonucleotide
  X-linked inhibitor of apoptosis (XIAP) siRNA
cttagaacctttctgtgtggaaa

SEQ ID NO: 18393 - DNA, 23 bp, Artificial Sequence
  Description of Artificial Sequence: Synthetic oligonucleotide
  X-linked inhibitor of apoptosis (XIAP) siRNA
ttagaacctttctgtgtggaaaa

SEQ ID NO: 18394 - DNA, 23 bp, Artificial Sequence
  Description of Artificial Sequence: Synthetic oligonucleotide
  X-linked inhibitor of apoptosis (XIAP) siRNA
tagaacctttctgtgtggaaaac

SEQ ID NO: 18395 - DNA, 23 bp, Artificial Sequence
  Description of Artificial Sequence: Synthetic oligonucleotide
  X-linked inhibitor of apoptosis (XIAP) siRNA
agaacctttctgtgtggaaaact

SEQ ID NO: 18396 - DNA, 23 bp, Artificial Sequence
  Description of Artificial Sequence: Synthetic oligonucleotide
  X-linked inhibitor of apoptosis (XIAP) siRNA
gaacctttctgtgtggaaaacta

SEQ ID NO: 18397 - DNA, 23 bp, Artificial Sequence
  Description of Artificial Sequence: Synthetic oligonucleotide
  X-linked inhibitor of apoptosis (XIAP) siRNA
aacctttctgtgtggaaaactaa

SEQ ID NO: 18398 - DNA, 23 bp, Artificial Sequence
  Description of Artificial Sequence: Synthetic oligonucleotide
  X-linked inhibitor of apoptosis (XIAP) siRNA
acctttctgtgtggaaaactaag

SEQ ID NO: 18399 - DNA, 23 bp, Artificial Sequence
  Description of Artificial Sequence: Synthetic oligonucleotide
  X-linked inhibitor of apoptosis (XIAP) siRNA
cctttctgtgtggaaaactaaga

SEQ ID NO: 18400 - DNA, 23 bp, Artificial Sequence
  Description of Artificial Sequence: Synthetic oligonucleotide
  X-linked inhibitor of apoptosis (XIAP) siRNA
ctttctgtgtggaaaactaagaa

SEQ ID NO: 18401 - DNA, 23 bp, Artificial Sequence
  Description of Artificial Sequence: Synthetic oligonucleotide
  X-linked inhibitor of apoptosis (XIAP) siRNA
tttctgtgtggaaaactaagaaa

SEQ ID NO: 18402 - DNA, 23 bp, Artificial Sequence
  Description of Artificial Sequence: Synthetic oligonucleotide
  X-linked inhibitor of apoptosis (XIAP) siRNA
ttctgtgtggaaaactaagaaaa

SEQ ID NO: 18403 - DNA, 23 bp, Artificial Sequence
  Description of Artificial Sequence: Synthetic oligonucleotide
  X-linked inhibitor of apoptosis (XIAP) siRNA
tctgtgtggaaaactaagaaaat

SEQ ID NO: 18404 - DNA, 23 bp, Artificial Sequence
  Description of Artificial Sequence: Synthetic oligonucleotide
  X-linked inhibitor of apoptosis (XIAP) siRNA
ctgtgtggaaaactaagaaaatt

SEQ ID NO: 18405 - DNA, 23 bp, Artificial Sequence
  Description of Artificial Sequence: Synthetic oligonucleotide
  X-linked inhibitor of apoptosis (XIAP) siRNA
tgtgtggaaaactaagaaaattg

SEQ ID NO: 18406 - DNA, 23 bp, Artificial Sequence
  Description of Artificial Sequence: Synthetic oligonucleotide
  X-linked inhibitor of apoptosis (XIAP) siRNA
gtgtggaaaactaagaaaattgc

SEQ ID NO: 18407 - DNA, 23 bp, Artificial Sequence
  Description of Artificial Sequence: Synthetic oligonucleotide
  X-linked inhibitor of apoptosis (XIAP) siRNA
tgtggaaaactaagaaaattgct

SEQ ID NO: 18408 - DNA, 23 bp, Artificial Sequence
  Description of Artificial Sequence: Synthetic oligonucleotide
  X-linked inhibitor of apoptosis (XIAP) siRNA
gtggaaaactaagaaaattgctt

SEQ ID NO: 18409 - DNA, 23 bp, Artificial Sequence
  Description of Artificial Sequence: Synthetic oligonucleotide
  X-linked inhibitor of apoptosis (XIAP) siRNA
tggaaaactaagaaaattgcttt

SEQ ID NO: 18410 - DNA, 23 bp, Artificial Sequence
  Description of Artificial Sequence: Synthetic oligonucleotide
  X-linked inhibitor of apoptosis (XIAP) siRNA
ggaaaactaagaaaattgctttc

SEQ ID NO: 18411 - DNA, 23 bp, Artificial Sequence
  Description of Artificial Sequence: Synthetic oligonucleotide
  X-linked inhibitor of apoptosis (XIAP) siRNA
gaaaactaagaaaattgctttct

SEQ ID NO: 18412 - DNA, 23 bp, Artificial Sequence
  Description of Artificial Sequence: Synthetic oligonucleotide
  X-linked inhibitor of apoptosis (XIAP) siRNA
aaaactaagaaaattgctttctg

SEQ ID NO: 18413 - DNA, 23 bp, Artificial Sequence
  Description of Artificial Sequence: Synthetic oligonucleotide
  X-linked inhibitor of apoptosis (XIAP) siRNA
aaactaagaaaattgctttctgc

SEQ ID NO: 18414 - DNA, 23 bp, Artificial Sequence
  Description of Artificial Sequence: Synthetic oligonucleotide
  X-linked inhibitor of apoptosis (XIAP) siRNA
aactaagaaaattgctttctgct

SEQ ID NO: 18415 - DNA, 23 bp, Artificial Sequence
  Description of Artificial Sequence: Synthetic oligonucleotide
  X-linked inhibitor of apoptosis (XIAP) siRNA
actaagaaaattgctttctgctg

SEQ ID NO: 18416 - DNA, 23 bp, Artificial Sequence
  Description of Artificial Sequence: Synthetic oligonucleotide
  X-linked inhibitor of apoptosis (XIAP) siRNA
ctaagaaaattgctttctgctgt

SEQ ID NO: 18417 - DNA, 23 bp, Artificial Sequence
  Description of Artificial Sequence: Synthetic oligonucleotide
  X-linked inhibitor of apoptosis (XIAP) siRNA
taagaaaattgctttctgctgta

SEQ ID NO: 18418 - DNA, 23 bp, Artificial Sequence
  Description of Artificial Sequence: Synthetic oligonucleotide
  X-linked inhibitor of apoptosis (XIAP) siRNA
aagaaaattgctttctgctgtat

SEQ ID NO: 18419 - DNA, 23 bp, Artificial Sequence
  Description of Artificial Sequence: Synthetic oligonucleotide
  X-linked inhibitor of apoptosis (XIAP) siRNA
agaaaattgctttctgctgtata

SEQ ID NO: 18420 - DNA, 23 bp, Artificial Sequence
  Description of Artificial Sequence: Synthetic oligonucleotide
  X-linked inhibitor of apoptosis (XIAP) siRNA
gaaaattgctttctgctgtataa

SEQ ID NO: 18421 - DNA, 23 bp, Artificial Sequence
  Description of Artificial Sequence: Synthetic oligonucleotide
  X-linked inhibitor of apoptosis (XIAP) siRNA
aaaattgctttctgctgtataat

SEQ ID NO: 18422 - DNA, 23 bp, Artificial Sequence
  Description of Artificial Sequence: Synthetic oligonucleotide
  X-linked inhibitor of apoptosis (XIAP) siRNA
aaattgctttctgctgtataatc

SEQ ID NO: 18423 - DNA, 23 bp, Artificial Sequence
  Description of Artificial Sequence: Synthetic oligonucleotide
  X-linked inhibitor of apoptosis (XIAP) siRNA
aattgctttctgctgtataatct

SEQ ID NO: 18424 - DNA, 23 bp, Artificial Sequence
  Description of Artificial Sequence: Synthetic oligonucleotide
  X-linked inhibitor of apoptosis (XIAP) siRNA
attgctttctgctgtataatctg

SEQ ID NO: 18425 - DNA, 23 bp, Artificial Sequence
  Description of Artificial Sequence: Synthetic oligonucleotide
  X-linked inhibitor of apoptosis (XIAP) siRNA
ttgctttctgctgtataatctgg

SEQ ID NO: 18426 - DNA, 23 bp, Artificial Sequence
  Description of Artificial Sequence: Synthetic oligonucleotide
  X-linked inhibitor of apoptosis (XIAP) siRNA
tgctttctgctgtataatctggc

SEQ ID NO: 18427 - DNA, 23 bp, Artificial Sequence
  Description of Artificial Sequence: Synthetic oligonucleotide
  X-linked inhibitor of apoptosis (XIAP) siRNA
gctttctgctgtataatctggca

SEQ ID NO: 18428 - DNA, 23 bp, Artificial Sequence
  Description of Artificial Sequence: Synthetic oligonucleotide
  X-linked inhibitor of apoptosis (XIAP) siRNA
ctttctgctgtataatctggcat

SEQ ID NO: 18429 - DNA, 23 bp, Artificial Sequence
  Description of Artificial Sequence: Synthetic oligonucleotide
  X-linked inhibitor of apoptosis (XIAP) siRNA
tttctgctgtataatctggcatt

SEQ ID NO: 18430 - DNA, 23 bp, Artificial Sequence
  Description of Artificial Sequence: Synthetic oligonucleotide
  X-linked inhibitor of apoptosis (XIAP) siRNA
ttctgctgtataatctggcattc

SEQ ID NO: 18431 - DNA, 23 bp, Artificial Sequence
  Description of Artificial Sequence: Synthetic oligonucleotide
  X-linked inhibitor of apoptosis (XIAP) siRNA
tctgctgtataatctggcattca

SEQ ID NO: 18432 - DNA, 23 bp, Artificial Sequence
  Description of Artificial Sequence: Synthetic oligonucleotide
  X-linked inhibitor of apoptosis (XIAP) siRNA
ctgctgtataatctggcattcat

SEQ ID NO: 18433 - DNA, 23 bp, Artificial Sequence
  Description of Artificial Sequence: Synthetic oligonucleotide
  X-linked inhibitor of apoptosis (XIAP) siRNA
tgctgtataatctggcattcatt

SEQ ID NO: 18434 - DNA, 23 bp, Artificial Sequence
  Description of Artificial Sequence: Synthetic oligonucleotide
  X-linked inhibitor of apoptosis (XIAP) siRNA
gctgtataatctggcattcattg

SEQ ID NO: 18435 - DNA, 23 bp, Artificial Sequence
  Description of Artificial Sequence: Synthetic oligonucleotide
  X-linked inhibitor of apoptosis (XIAP) siRNA
ctgtataatctggcattcattgt

SEQ ID NO: 18436 - DNA, 23 bp, Artificial Sequence
  Description of Artificial Sequence: Synthetic oligonucleotide
  X-linked inhibitor of apoptosis (XIAP) siRNA
tgtataatctggcattcattgta

SEQ ID NO: 18437 - DNA, 23 bp, Artificial Sequence
  Description of Artificial Sequence: Synthetic oligonucleotide
  X-linked inhibitor of apoptosis (XIAP) siRNA
gtataatctggcattcattgtag

SEQ ID NO: 18438 - DNA, 23 bp, Artificial Sequence
  Description of Artificial Sequence: Synthetic oligonucleotide
  X-linked inhibitor of apoptosis (XIAP) siRNA
tataatctggcattcattgtaga

SEQ ID NO: 18439 - DNA, 23 bp, Artificial Sequence
  Description of Artificial Sequence: Synthetic oligonucleotide
  X-linked inhibitor of apoptosis (XIAP) siRNA
ataatctggcattcattgtagat

SEQ ID NO: 18440 - DNA, 23 bp, Artificial Sequence
  Description of Artificial Sequence: Synthetic oligonucleotide
  X-linked inhibitor of apoptosis (XIAP) siRNA
taatctggcattcattgtagatt

SEQ ID NO: 18441 - DNA, 23 bp, Artificial Sequence
  Description of Artificial Sequence: Synthetic oligonucleotide
  X-linked inhibitor of apoptosis (XIAP) siRNA
aatctggcattcattgtagatta

SEQ ID NO: 18442 - DNA, 23 bp, Artificial Sequence
  Description of Artificial Sequence: Synthetic oligonucleotide
  X-linked inhibitor of apoptosis (XIAP) siRNA
atctggcattcattgtagattaa

SEQ ID NO: 18443 - DNA, 23 bp, Artificial Sequence
  Description of Artificial Sequence: Synthetic oligonucleotide
  X-linked inhibitor of apoptosis (XIAP) siRNA
tctggcattcattgtagattaaa

SEQ ID NO: 18444 - DNA, 23 bp, Artificial Sequence
  Description of Artificial Sequence: Synthetic oligonucleotide
  X-linked inhibitor of apoptosis (XIAP) siRNA
ctggcattcattgtagattaaag

SEQ ID NO: 18445 - DNA, 23 bp, Artificial Sequence
  Description of Artificial Sequence: Synthetic oligonucleotide
  X-linked inhibitor of apoptosis (XIAP) siRNA
tggcattcattgtagattaaagc

SEQ ID NO: 18446 - DNA, 23 bp, Artificial Sequence
  Description of Artificial Sequence: Synthetic oligonucleotide
  X-linked inhibitor of apoptosis (XIAP) siRNA
ggcattcattgtagattaaagct

SEQ ID NO: 18447 - DNA, 23 bp, Artificial Sequence
  Description of Artificial Sequence: Synthetic oligonucleotide
  X-linked inhibitor of apoptosis (XIAP) siRNA
gcattcattgtagattaaagctt

SEQ ID NO: 18448 - DNA, 23 bp, Artificial Sequence
  Description of Artificial Sequence: Synthetic oligonucleotide
  X-linked inhibitor of apoptosis (XIAP) siRNA
cattcattgtagattaaagctta

SEQ ID NO: 18449 - DNA, 23 bp, Artificial Sequence
  Description of Artificial Sequence: Synthetic oligonucleotide
  X-linked inhibitor of apoptosis (XIAP) siRNA
attcattgtagattaaagcttat

SEQ ID NO: 18450 - DNA, 23 bp, Artificial Sequence
  Description of Artificial Sequence: Synthetic oligonucleotide
  X-linked inhibitor of apoptosis (XIAP) siRNA
ttcattgtagattaaagcttatt

SEQ ID NO: 18451 - DNA, 23 bp, Artificial Sequence
  Description of Artificial Sequence: Synthetic oligonucleotide
  X-linked inhibitor of apoptosis (XIAP) siRNA
tcattgtagattaaagcttattt

SEQ ID NO: 18452 - DNA, 23 bp, Artificial Sequence
  Description of Artificial Sequence: Synthetic oligonucleotide
  X-linked inhibitor of apoptosis (XIAP) siRNA
cattgtagattaaagcttatttt

SEQ ID NO: 18453 - DNA, 23 bp, Artificial Sequence
  Description of Artificial Sequence: Synthetic oligonucleotide
  X-linked inhibitor of apoptosis (XIAP) siRNA
attgtagattaaagcttattttt

SEQ ID NO: 18454 - DNA, 23 bp, Artificial Sequence
  Description of Artificial Sequence: Synthetic oligonucleotide
  X-linked inhibitor of apoptosis (XIAP) siRNA
ttgtagattaaagcttatttttc

SEQ ID NO: 18455 - DNA, 23 bp, Artificial Sequence
  Description of Artificial Sequence: Synthetic oligonucleotide
  X-linked inhibitor of apoptosis (XIAP) siRNA
tgtagattaaagcttatttttct

SEQ ID NO: 18456 - DNA, 23 bp, Artificial Sequence
  Description of Artificial Sequence: Synthetic oligonucleotide
  X-linked inhibitor of apoptosis (XIAP) siRNA
gtagattaaagcttatttttctg

SEQ ID NO: 18457 - DNA, 23 bp, Artificial Sequence
  Description of Artificial Sequence: Synthetic oligonucleotide
  X-linked inhibitor of apoptosis (XIAP) siRNA
tagattaaagcttatttttctgt

SEQ ID NO: 18458 - DNA, 23 bp, Artificial Sequence
  Description of Artificial Sequence: Synthetic oligonucleotide
  X-linked inhibitor of apoptosis (XIAP) siRNA
agattaaagcttatttttctgtg

SEQ ID NO: 18459 - DNA, 23 bp, Artificial Sequence
  Description of Artificial Sequence: Synthetic oligonucleotide
  X-linked inhibitor of apoptosis (XIAP) siRNA
gattaaagcttatttttctgtga

SEQ ID NO: 18460 - DNA, 23 bp, Artificial Sequence
  Description of Artificial Sequence: Synthetic oligonucleotide
  X-linked inhibitor of apoptosis (XIAP) siRNA
attaaagcttatttttctgtgaa

SEQ ID NO: 18461 - DNA, 23 bp, Artificial Sequence
  Description of Artificial Sequence: Synthetic oligonucleotide
  X-linked inhibitor of apoptosis (XIAP) siRNA
ttaaagcttatttttctgtgaat

SEQ ID NO: 18462 - DNA, 23 bp, Artificial Sequence
  Description of Artificial Sequence: Synthetic oligonucleotide
  X-linked inhibitor of apoptosis (XIAP) siRNA
taaagcttatttttctgtgaata

SEQ ID NO: 18463 - DNA, 23 bp, Artificial Sequence
  Description of Artificial Sequence: Synthetic oligonucleotide
  X-linked inhibitor of apoptosis (XIAP) siRNA
aaagcttatttttctgtgaataa

SEQ ID NO: 18464 - DNA, 23 bp, Artificial Sequence
  Description of Artificial Sequence: Synthetic oligonucleotide
  X-linked inhibitor of apoptosis (XIAP) siRNA
aagcttatttttctgtgaataaa

SEQ ID NO: 18465 - DNA, 23 bp, Artificial Sequence
  Description of Artificial Sequence: Synthetic oligonucleotide
  X-linked inhibitor of apoptosis (XIAP) siRNA
agcttatttttctgtgaataaaa

SEQ ID NO: 18466 - DNA, 23 bp, Artificial Sequence
  Description of Artificial Sequence: Synthetic oligonucleotide
  X-linked inhibitor of apoptosis (XIAP) siRNA
gcttatttttctgtgaataaaac

SEQ ID NO: 18467 - DNA, 23 bp, Artificial Sequence
  Description of Artificial Sequence: Synthetic oligonucleotide
  X-linked inhibitor of apoptosis (XIAP) siRNA
cttatttttctgtgaataaaacg

SEQ ID NO: 18468 - DNA, 23 bp, Artificial Sequence
  Description of Artificial Sequence: Synthetic oligonucleotide
  X-linked inhibitor of apoptosis (XIAP) siRNA
ttatttttctgtgaataaaacgt

SEQ ID NO: 18469 - DNA, 23 bp, Artificial Sequence
  Description of Artificial Sequence: Synthetic oligonucleotide
  X-linked inhibitor of apoptosis (XIAP) siRNA
tatttttctgtgaataaaacgta

SEQ ID NO: 18470 - DNA, 23 bp, Artificial Sequence
  Description of Artificial Sequence: Synthetic oligonucleotide
  X-linked inhibitor of apoptosis (XIAP) siRNA
atttttctgtgaataaaacgtat

SEQ ID NO: 18471 - DNA, 23 bp, Artificial Sequence
  Description of Artificial Sequence: Synthetic oligonucleotide
  X-linked inhibitor of apoptosis (XIAP) siRNA
tttttctgtgaataaaacgtatt

SEQ ID NO: 18472 - DNA, 23 bp, Artificial Sequence
  Description of Artificial Sequence: Synthetic oligonucleotide
  X-linked inhibitor of apoptosis (XIAP) siRNA
ttttctgtgaataaaacgtattc

SEQ ID NO: 18473 - DNA, 23 bp, Artificial Sequence
  Description of Artificial Sequence: Synthetic oligonucleotide
  X-linked inhibitor of apoptosis (XIAP) siRNA
tttctgtgaataaaacgtattca

SEQ ID NO: 18474 - DNA, 23 bp, Artificial Sequence
  Description of Artificial Sequence: Synthetic oligonucleotide
  X-linked inhibitor of apoptosis (XIAP) siRNA
ttctgtgaataaaacgtattcaa

SEQ ID NO: 18475 - DNA, 23 bp, Artificial Sequence
  Description of Artificial Sequence: Synthetic oligonucleotide
  X-linked inhibitor of apoptosis (XIAP) siRNA
tctgtgaataaaacgtattcaat

SEQ ID NO: 18476 - DNA, 23 bp, Artificial Sequence
  Description of Artificial Sequence: Synthetic oligonucleotide
  X-linked inhibitor of apoptosis (XIAP) siRNA
ctgtgaataaaacgtattcaata

SEQ ID NO: 18477 - DNA, 23 bp, Artificial Sequence
  Description of Artificial Sequence: Synthetic oligonucleotide
  X-linked inhibitor of apoptosis (XIAP) siRNA
tgtgaataaaacgtattcaataa

SEQ ID NO: 18478 - DNA, 23 bp, Artificial Sequence
  Description of Artificial Sequence: Synthetic oligonucleotide
  X-linked inhibitor of apoptosis (XIAP) siRNA
gtgaataaaacgtattcaataaa

SEQ ID NO: 18479 - DNA, 23 bp, Artificial Sequence
  Description of Artificial Sequence: Synthetic oligonucleotide
  X-linked inhibitor of apoptosis (XIAP) siRNA
tgaataaaacgtattcaataaaa

SEQ ID NO: 18480 - DNA, 23 bp, Artificial Sequence
  Description of Artificial Sequence: Synthetic oligonucleotide
  X-linked inhibitor of apoptosis (XIAP) siRNA
gaataaaacgtattcaataaaat

SEQ ID NO: 18481 - DNA, 23 bp, Artificial Sequence
  Description of Artificial Sequence: Synthetic oligonucleotide
  X-linked inhibitor of apoptosis (XIAP) siRNA
aataaaacgtattcaataaaata

SEQ ID NO: 18482 - DNA, 23 bp, Artificial Sequence
  Description of Artificial Sequence: Synthetic oligonucleotide
  X-linked inhibitor of apoptosis (XIAP) siRNA
ataaaacgtattcaataaaatac

SEQ ID NO: 18483 - DNA, 23 bp, Artificial Sequence
  Description of Artificial Sequence: Synthetic oligonucleotide
  X-linked inhibitor of apoptosis (XIAP) siRNA
taaaacgtattcaataaaatact

SEQ ID NO: 18484 - DNA, 23 bp, Artificial Sequence
  Description of Artificial Sequence: Synthetic oligonucleotide
  X-linked inhibitor of apoptosis (XIAP) siRNA
aaaacgtattcaataaaatacta

SEQ ID NO: 18485 - DNA, 23 bp, Artificial Sequence
  Description of Artificial Sequence: Synthetic oligonucleotide
  X-linked inhibitor of apoptosis (XIAP) siRNA
aaacgtattcaataaaatactat

SEQ ID NO: 18486 - DNA, 23 bp, Artificial Sequence
  Description of Artificial Sequence: Synthetic oligonucleotide
  X-linked inhibitor of apoptosis (XIAP) siRNA
aacgtattcaataaaatactatt

SEQ ID NO: 18487 - DNA, 23 bp, Artificial Sequence
  Description of Artificial Sequence: Synthetic oligonucleotide
  X-linked inhibitor of apoptosis (XIAP) siRNA
acgtattcaataaaatactattc

SEQ ID NO: 18488 - DNA, 23 bp, Artificial Sequence
  Description of Artificial Sequence: Synthetic oligonucleotide
  X-linked inhibitor of apoptosis (XIAP) siRNA
cgtattcaataaaatactattct

SEQ ID NO: 18489 - DNA, 23 bp, Artificial Sequence
  Description of Artificial Sequence: Synthetic oligonucleotide
  X-linked inhibitor of apoptosis (XIAP) siRNA
gtattcaataaaatactattctt

SEQ ID NO: 18490 - DNA, 23 bp, Artificial Sequence
  Description of Artificial Sequence: Synthetic oligonucleotide
  X-linked inhibitor of apoptosis (XIAP) siRNA
tattcaataaaatactattcttt

SEQ ID NO: 18491 - DNA, 23 bp, Artificial Sequence
  Description of Artificial Sequence: Synthetic oligonucleotide
  X-linked inhibitor of apoptosis (XIAP) siRNA
attcaataaaatactattcttta

SEQ ID NO: 18492 - DNA, 23 bp, Artificial Sequence
  Description of Artificial Sequence: Synthetic oligonucleotide
  X-linked inhibitor of apoptosis (XIAP) siRNA
ttcaataaaatactattctttaa

SEQ ID NO: 18493 - DNA, 23 bp, Artificial Sequence
  Description of Artificial Sequence: Synthetic oligonucleotide
  X-linked inhibitor of apoptosis (XIAP) siRNA
tcaataaaatactattctttaaa

SEQ ID NO: 18494 - DNA, 23 bp, Artificial Sequence
  Description of Artificial Sequence: Synthetic oligonucleotide
  X-linked inhibitor of apoptosis (XIAP) siRNA
caataaaatactattctttaaaa

SEQ ID NO: 18495 - DNA, 23 bp, Artificial Sequence
  Description of Artificial Sequence: Synthetic oligonucleotide
  X-linked inhibitor of apoptosis (XIAP) siRNA
aataaaatactattctttaaaat

SEQ ID NO: 18496 - DNA, 23 bp, Artificial Sequence
  Description of Artificial Sequence: Synthetic oligonucleotide
  X-linked inhibitor of apoptosis (XIAP) siRNA
ataaaatactattctttaaaatt

SEQ ID NO: 18497 - DNA, 23 bp, Artificial Sequence
  Description of Artificial Sequence: Synthetic oligonucleotide
  X-linked inhibitor of apoptosis (XIAP) siRNA
taaaatactattctttaaaatta

SEQ ID NO: 18498 - protein, 4 aa, Artificial Sequence
  Description of Artificial Sequence: Synthetic peptide
DEVD
